United States Patent Application Publication US 2020/0377945 A1 - sequence listing, part 63

SEQ ID NO: 14292 - DNA, 121127 bp, Unknown
  gut microbiota DNA sequence
cccttcccttcatcggcattgcccgatttctacagtactatgggattgtccgaccacctaccattcatttgaaatcctccgttttcagttgcaacttcatactcttcttcgagaaatggcaggttctccccagttgatgtgtattcacaatgtaaaacatgattggttctctgactccgcagtgccacataatactcgccatatcgcattacatgatattgtcttccgcaccagttaagacgtcgaccgactgaagttaacgtttcgaagctcaatcactattcaaccctgctttcttgctgtctacgcttgtcagatgccgttaccggcatcatcccaagactcgctattatctggttggctaaaccttggataaaccggaatcccaccggcttgactacacacccttagctgggcgcacgactggaagttacttctttcttttcgcaaacttatcaataacattgtctgcccaaaaagtaataaagaaatcagcaatctcagcaaatagattaataataaaatcaaacatataagtttcctccaacttacgatttgtataataatatcttatatcatatatgtaacttgtcaatttatatatcgtaaattaggcagattttgtagctacattcataacataaagcagggcagatatcaaagtctgtgcacaagtcagtcactgcataaataaaaagaaaaatcgtacaaacaaatatgatttcctttgtgagctttgcgaacaggaacatcatatttcgtttgtacgattttctttttcatgattggttataatactttcaagcacttccagccctttttgtatttcctgttcgtccggttttccatatcctaacaagagtaccggttttccctccggcggagtgtgaatataatgctctctgatacccataaggcggattccgcactctgcggcttttttacagatttcttcctctgtaagcgttgtattcacctgcacaagcacatgcagtcctgcgttatcccctgcaatattctccacccagttttttttcttcaattcgccgactaaaaaatcatgcttgtttttataaattccacgcattttatttaaatgtctgccaaagtatcctccccggatgaattcccgcaatacttcctgctgaatcttcgaaacggttgtggaatagaagctgcatgattcctgatatttttttaacaaatgcaacggaagaaccatgtagctgattcgcaaggacggcgcaatactttttgaaaaagtacccagatatatcaccttttcctcgtgatcaatactctgcaatgacgggattggctttcccttataacgatactcactgtcgtggtcgtcctcgatcagatatctgccctctttttccgatgcccactttaaaagttcaagcctgcgttttaaaggcattactgttcctaacgggaactggtgggaaggcatgacatacaaaatatctgcgtcttccctgcgcactgcctcgattggcatacttccatgctcctgtgggatgtttttcactacatatcccatattgaaaaatgtacggtatgcctgaagatatgttggatcatccattaataccgttttcttttctcccagtacctgtgccaacagaatttccagatactcgttacccgcgccaatcacgatctgcgtggcatcacagtttacccctcttgcctgatgcagataatctgcgattgctgcacgaagttcataatcaccctgtccgtctcctgacaaaagtatttcttccctgtcatcaagcagtacatttttatgcagcttccgccagacattatagggaaaattctgtgtgtcgattgcataaggggaaaaatcaattttctgctgattgttgcttttttgtgctatctcgttgaaagtatctttttctgcatttcctgcgttttttttcaatattaccagagggctccgctgttccaactggtagagtgcttcaatatcgcacacaaagtaaccgcgatatggctctgcttcaatataaccctctgctaaaagctggtcatatgccagttccaccgtactgcggctcacggacagattttttgccaataaacgggttgacggtaatttttcccctttggaaatcttaccgtcaacaatctcatttttgatatattcatatattttttcataaaggggcgctttcgcgcccccctgcagatcaatcataatctcgttcattgcaatcctcttactctttgccaattcttgatgtcggatcttcccctgccgccttttacgctttggaatccttaatttcccggatgatctcctctttcagatcaaatgcacgatccttcatcttcttagaagcagagcttgtagacatgatcctggaaatacatttggacgcagtatcgtaacgtttgaaatgctttgacattgcagcaagcagataatctaccgttgtctgatccatgccgcacattgggaacatctctgtggatacagcctttaaaaagccttcataagcctgattataaaatgcctcctgctgctccagacactccctgcgttcctgttccagcgaagcatccttctcgtccatgccctctaactttccacgatagagccatgaaatcttaagacaggtatatgccttctcacttgcttttcctttttttacaagagtattaaacagtgcgagtttgtaacggttgattgccgtatcataatcatataccgccggttcttcaccagtcggcttaaaatttgcacatattttctctttgatcagtttgatctggaccgatgacagatgttcaaagtagcggttcattgctgtataaccgcagtttggacatgatgcaacatcatattttaaagtatcaatatacataaatcttggtctcagatcaaaatccggttcgagacgtttcactcttccgtttttgatcatttttgttttgaacactttatcgcacacagtgcagcgcactgatttttctaacagaaatgattcctcagaaggtatttcttcttttgcctctccctgctctgttgatgcattggttcttttttcttcttcaaacagattttctgtaccctctgtcttcagaccgaacttttccagtcccttgaataaattcatatccgttcctccaatattgactgcttttcttgatcgtaaattagttatttaacggcaatttaaatgaactcttcagcgaaacgatccggttaaatacgagatgttccggtgtagaatcttttgcatctacacaaaagaatccctgacgcacaaactggaagctgtcataagcctttgcgtctgcaagattctcctctacataacagtcctttaatactgtcagtgagtttggattcaggttcaggcttccgtcctcattgtatacacccttctcttcatccacaatattttcatacaaccggatctctgcttttacattcttctcagcagacacccactggatcgttccttttactttacgtccatccgggctgtttcctccgcgggaagccgggtcgtaggtacagtggatctctgtcactttaccgttctcatctttcacgaagctgttgcatgttacaaagtatgcgttcataagacgaacttcatttcccgggaacatacggaaatatttctttggcggctcttccataaagtcctcacggtcaatgtagatttcccttccaaatggcacttttctgcttccaagttcttcattttcaaggttattcacaacatccagatattcaatctgtccttccggatagttatcaatgactactttgaccggatcaaggattgccatcatacgtggtttctttaatttcaaatcctcacggatacagtactcaagcattgcatagtctacggaactgtttgctttggagattccgcaaagatctacgaacatcttaatggattccggtgtgaatcctcttcttcttaatgctgcaatggaaacgagacgaggatcatcccatccgtccacaataccttcctctaccagacgcttgatataacgcttacctgttactacatttgtcagatataattttgcaaactcaatctgtcttggcggcatctcgtccttattcgggatcatatctttgccgacttcctcaacaacccagttataaagtggtctgtggtcttcgaactccaaagtacagatagagtgggtaattccctcaatcgcatcctcgattggatgtgcataatcgtacattggatagatgcaccatttatcaccggttctgtgatgtgtcatatgtgccacacggtaaataaccgggtctctcatattgatattagaagatgccatatcaattcttgcacgaagcactttctctccgtctgcaaatttgccattcttcatatcttcaaataatgcaaggttttcttcaacagaacgtgtgctgtacggatcttcctttccaggttctgtcaaagttcccctgtattcacggatctgctctgcggagagatcggatacatatgcttttccttttttgatcagctttacagcaccttcgtacatctggtcgaagtaatcagatgcaaagaaaagtctgccttcccagtcagctccaagccattcgatatcagactggattgcctctacaaattctgttttttcttttgtagggtttgtatcatcaaatcgaagattgaactttccgccgtatttctgtgccagtccataatttaaaagaatggactttgcatgtccgatgtgaaggtaaccatttggttccggtggaaatctcgtatggacttctttacaatgtccttcctcgatatctttatcaatcatctgctcaataaaattcttagagacagtttcgttttccataatatcctccttgtttcgctaagcaaaatgcagatcttctgtaaaatctcattttgccgtaatgcagtctatctaatatcttatcacgatgtaccttttagacgcaagtataatatagcatgaatttacgtacttttccagttatttataaaagtaaaaagggaggcggacaccataagcggcttcgcttccctttttcctgttcttcttatcgttcctcacggaaatatgcctcaccgagacttgccggcggctgattttcctgtttattccgcttgcttgtgataatcagtacaatgatcgtcacaacatatggcagcatctttacaagctcctgtgttgctctgttcaatcccggaagataaatatacagaatgtataatccaccgaagacaaatgagccccagatcgcatgatccggattccagagtgcaaggataacaagtgcgattgcaagccatccacggtcaccaaatccgttatttgaccacgtaccgccaagatattccataacaaaataaagtccaccaagacctgcgattgctgcaccggtcaccgtagcaacgtatttgtatttggaaacattgatacctgctgcatccgcagttgccgggctttcaccgacagccctaagattcagtccttttcttgtttttttcaaaaaataagtcatcacaactgccacaataattgacagataagttaaaaatccatatgagaataataacgtaccgatcaccggaatttgggataagccgggaatcgttgtgcggtatgctgctgctgttgtctgaacagagatctgtccgacaccacctgctaatttggagatagaaccaccaaagaaattaccgaatccaacaccaaaagtcgtcagtgcaagacctaccacattctggtttgcgcgcagtgtgatcgtcaggaaactgtaaatcagaccgccaaatgcagatgcgatcagtgtgcataacagggagacaaacagcccgatcacaccatttggtgtctcggtacctttttcatagaaaaatgcacccataagtccggcaataccgcccatgtacataatacccggaattccaagatttaagttaccggatttttctgtgacaatttcaccggatgcaccaaataaaatggcaacaccctgtccgattgccttctggataaacgtcaataataatgtcattttatttgtctcctttcttgcggaactctaatttgtagttaataaagaattcacatccgatcaggaagaataacaaaatacctgtgataatatccgatgcattttcatttaatccatactgggatgcgatctggattgatccctgctgcatgaatacaaggaaaccggaaactaagatcatggcaagtggattgaattttgacatccacgctacaatgatcgccgtaaatccacgtccgcctgctgtgctggtcgaaatcgtatggctcgcaccgctcacaatgacagcgcctgcgataccgcagatcgcaccggagatcatcatggtacggataatcactttctttacgttgattccggcatatcttgccgtgttctggctctctcccacaacggagatctcatatccctgtttggaatatttcatataaatatagactagcaatgtgatcgccagaacaatgatcacattcaacgtatacgcattgccgaaaattgtcgggaaccagccctttcttgttgcggcattgataataccgacggtgttggaaccggaaggattttcccagaaaacgatgcagaaggttacgatctgcattgccacgtagtttaacatcaatgtgaataatgtctcatttgtattaaagtatgctttaaaaatagccgggatcacgccccagatcagtccagccagtccactgacaacaaaaatcacgatcagtaacagccagtttggcattttgtcaccaaaatagatcatcatggctgcggttgctgtaccgcccattaaaatctgtccctcggctccgatgttccagaatttcattttaaatgccggggtaagtcctatggcaatacataaaagtaccatcatctcgcggatcgttacccagattctacggttacttccaaccgctccatcaatgattccaagataaacttcgattggattctgttttgtgatcgccacaatgacaagtgctgcaactacaagcgacaaggccactgcgatcaggcggattgcccatgctttacctgcactgatatggtctctttttaccatacgtgcaaaaggttctttcttcgaaatcacgttttccttactcattcttatcctccgtcaatccggtcatcatcagtcctaatttttcctttgttgtagtacgtgcatccacaatacctgcaacttttccactgttcaatacaagaatcttatcacaaagctctaacagaacatctaaatcttctcctacgcagatgactgctacaccttttttcttctggtcgtttaacagattgtaaatcgtgtaggaggaattgatatccagtcctctgaccggataagcaaccattaatacggttggattgcttgcgatctcacgtcctaccagaattttctgcacattaccaccagaaagtctgctgaccggggtatccacgccaggtgtcacgacatctaatttttccacgatatcttctgcaagttttttcggagattttcggtctgcaaagaaatgtcttccttccttataacttcggatcatcatgttgtctgtcagatccattgaacctaccagtcccattcccagacggtcttccggtacgaatgacagagtgattccgagatttttaatatcttctgctttcatctctgaaatcttttccgttgatccttccggggaataataaaggatttccccactctcgatcggctggagtcctgcaaccgattctaataactctttctgtccgcttccggaaattcctgcaacaccaagaatctctccactataagctgtgaaggaagcctctgtcaaaactttcagtccctctttgttcctgcaggtgattccacgcatctcaatacgtttttctgctcctacaggctctgtacgattgatgtcaagttttactttttcaccaaccatcatctcggtaagggattccaccgttgcttttgcagtctcaacggtatcaatgtattttccttttcgaaggactgccacacggtctgaaagttccaatacttcatttaatttatgtgtgatgataataatagattttccggcttttctcatgttgcggagaactgcaaacagtttttctgtctcctgcggtgtcaacactgccgtcggctcatctaagatcagaatatccgcaccacggtaaagcacttttacgatctctaccgtctgtttctgggatacggacatatcatagattttctgggacggattaagttcaaacccatactgttctgtcagttccctgatctctttttccacctgtttcatattcagtttttcttttccaggcagacccaaaataatattctcggcggctgtcaaaatattgatcagcttgaaatgctgatgaatcattccaattccgagtgcgaaggaatcttttggggagcgaatggtcacttcttttccatccacataaatttctccttcgtctgggaagtaaattccggaaagcatgttcatcaacgtagtctttccactaccattctctcctaaaattgaaagaatttcacctttcctgacggtcagattcacgttatcgttcgcaataacgtcaccgaaacgttttgttacacctttcagctcaatagcgtttcctgtttccacaaataatcctcctaaatgaatacgaaaatcctttcaaaataattatgaaaggattccctgctttttcttccaatattcctgttatggcaaagtgcagacatatctgcactttgccggcttgttttcagactagtttgcctgagaagtaataccatcaatgataatatcaaaggacggtgcagatgctaattcagattcatgatagtaaccatcagaaacgtaatcagcatattttgcataatctcccccctctgcgatcaggtcttctaaagaagatccgtttacagtaaaggttgttgtatcaaatacatgaagggaaccatcttttaatgctgcttcaacttcttctacttttgcatctgttccttctgctgcaacagcttcattcactggtgtgattctgactgcatcctcagagaatcctttgcaccagtctgtatcaattgcttttccgtctaatacacactgtacagcatatgtataatatacaccccagttatttgttggagaagtcaatgctgcatccggagctacagatgtcatatctacgttgtaacctacacaaggaactcctgctgtctcacaggctgttggagcacctgttgtatctgcatgctgactgatcagtacacagttatctgcgatcaactggttggcaacctctgcctctgctgacatatcagcccagctgtttgtatactgaacttccattgttgcggattcacatacactctttgctcctaagtagaaagaagtaaatcctgaaataacctctgcgtatgggaatgcaccaacataaccgatttttgcctggtctgctgtgatatctccattctcgatcatctcatttaatttcatacctgcaacaacaccggatacataacgtgcttcgtaaatagcatcgaagtagttgtgcatattagaaagtccggaacctgctgcctgatatcctgttgcatgacagaactgaatatccggatactctgctgctgcctgtaaaatgtaagtctcatgtccgaaacttgttgcaaaaataatgttacatccctgatctgcaaggtctactgctgcatcatagcaggactcgtcctccgggattgttgttttctcaatgatctggtcatcagataagccaaggtttgcagccatctcatcaataccagccatatgagctgctgtatatccttcgttctcatcaccgatataaataacaccaactttgatgtctgctgcagaagctgctgtctgtgtacctgcactagaaccgctttctgtagatgctgcagagttatctgctgcgcttccgttgtctgctgtgtctccacatcctgccaccatgctgacagtcattcccattgccaataaaacacttaatgcctttttcatataatcctccttgttttgcgaagcaaaatccgaactctatggtgaggaaaggatttagcctccctgttttccgtaggaaaaacttatttaaaaatacaaaagtcaatttagcatagcaattttttatcgtcaatatgattcacatggtaatttctgaaaaaatgtcaatttgggcaaaaaatttatcattgataaggctgactaatacacgatatatttcagactaataaaaaatacagcctttctccttctgtccggaaaaagactgtattctttcttatactcttctgatgtgctggtgggtaaacaggtgatcctggcaatattcataatttccttcacatttcgaacagaaacggaactgtaagttcggatcatccaactctgtgcgtccgcagaccgcacatttgtgttttgcgataccagaacccggtctcggctctctcatctgtgccttaaactgctgcctgcgatgcacctcatgtggggtatatcggctcagattcctcgtggaaaggaagaaaatgagataatttaacagtgacatcacaatgcataacagcataattcccgcataccacaatgccgtggcagtggactgggtgtaggcataaatcgtgtgatagctgtcccagacactgaataccataatgacaacgtaaacagccgccatccatttcatttttatcggaatgataaagtaaagtaacacctgcatatccggatataacgttgcaaacgcaaggaatatcgacatattaatataggaagtactgatcatctgtcccatcatcgtgcttgccgtatatgcaaaattgccacccataagcagatagatcagaccgtatgccaaaaggcttcccacctcggtcagaagtattccgccgataatataggcgttaaaccggaacgttccccacgcccgctccaacgcagttccaagctgataataaaacatcatcatgatcagcagaaaaatgatattgctgtctgtcggcatcaaaatccatgtgataagtctccagatctgtccatgtaaaatgtaataaggctggaaattcaagaatcctaatattttcggcgccaccatgttcaatacaaatccaacggaatatgctccgatcagatatataatcagattcgggatcgcatatcttccaaatttacgttctaatttatttaaccagttcatgttgctgctcctttttcaaatactctttttattgtctctgctatttcgaaacaatctagctaaagtatatctgtgtgtcaaacctttgtcaatcgacgctaaatttcttcataaaaagtttagatttttcagagtattttgacattgttttttgcattttcctgtcgtataatgtacagtgcttggtttttcgaccatatattataataagaagaaatacatatctgtaaacatataatatttatagatctgatgtacaaaagtttatttctggaggaaagatatgagtaacaatacacttcataaacttggaattgatattggttccaccacagtcaaggttgctgtgctggatgagaatgacaatctgttattctccgattacgagagacacttcgccaatatccgtgagactctctccatgttagtggaaaaagcttatgaaaaacttggggatatcaaaattgccccaatgatcaccggttccggcggtcttacccttgcaaaacatttagacgtgccgtttgttcaggaggttatctccgtatccacagcactgcagcactatgctccacagacagatgttgccattgagcttggcggtgaggatgcgaagatcatttattttgagggcggtaatgttgaacagcgtatgaatggtatctgtgccggtggtacgggttcttttatcgaccagatggcatccctgatccagacagatgcaaccgggctgaatgaatatgcaaagaattacaaggcgatctatccgattgctgccagatgtggtgtatttgccaaaacagatatccagcctctgatcaacgaaggtgccacaagagaagacttatctgcctctatttttcaggcagtcgtcaaccagacgatcagtggtcttgcatgtggaaagccgatccgcggacacgtcgctttcttaggcggtccactgcactttttatcggagttaaaagctgcatttatccgtactttaaacttagatgatgagcatgcgatcacaccggaaaattcccatctttttgcagcgatcggttctgcgttaaattataaagaagacaaagtaacttctttggaagaattacatacaaagctccagtctgacattcatatggaattcgaagttgcaagacttgatccacttttcaaagatcaggcagaatatgacgctttccgcgcacgccatgacggacaccatgtaaaatcagcagatttatccacttacgaaggaaactgctatctcggtatcgacgcgggttctaccacaaccaaagttgcactgatcggtgaggacggttccctgctgtactctttctacagtaacaacaacggcagtccgctctctactgcgatccgcgcgatcaaagatatttattccaagctgccggagaaagcacacattgtacactcctgctccaccggatacggcgaagctttgcagaaggctgctttaaaattagacgacggtgaagttgagactgttgcccatttttatgctgctgctttcttcgatcctgaggttgactgtatcctcgatatcggtggtcaggatatgaagtgcattaagatcaaaaatcagacggttgacagcgttcagttaaatgaagcctgttcttcgggctgtggttcctttatcgagacatttgcaaaatctctgaatttctctgtacaggattttgcaaaagaagctctttttgcaaagaacccgatcgaccttggaacccgctgtaccgtattcatgaattccaaagtaaaacaggctcagaaggaaggcgcttccgttgctgatatctctgccggtcttgcttattctgtcatcaaaaatgcattgtataaagtaatcaagctttccgatgccaaagacttaggacagaacattgtcgtacagggtggaactttctacaatgacgctgttttacgaagctttgaaaaaattgccggtgtacagtgtatccgtccggatattgccggtatcatgggtgcgttcggtgctgcattgattgcaagggaacgccatgaggaaggttatcagacctccatgctctctatcgaagaaatcaacgagcttacttttgacacaaagcttgcaagatgtcagggatgtacgaaccactgtctcttaactattaaccgtttctccggcaaccgccagtacattaccggtaaccgttgtgagcgtggtcttggaaaagagaagaacaaagaaaacattccaaacctttttgaatacaaaaacaaacgtatttttgactatgagccattaaccgctgaggaagcaacccgtggttctgttggtattccacgtgttttaaatatgtacgagaactatcctttctgggcaaccttctttaaaaagttaggttttcaggtagtgctctctccgtcttccacacgtaagatttacgagcttggtatcgactccattccttccgaatccgagtgttaccctgccaagcttgcacacggacatgtaacctggctgatccaccagaatgtggatttcattttctacccgtgtatcccttacgagagaaatgagttcccggattccaacaaccactataattgcccgattgttacttcttatgcggagaatattaaaaacaacgtggatgagatcacttccggtcaggtgaagttcttaaatccatttatggcattcacaaatgaggacaccttatcctcccagctcatcaaggtatttggttcttctgaattcggcatttccgaagcggagatccgcgatgcagtttccgaaggctggaaggaattagctgttgtccgcatggaaatgcagaaaaaaggtgaggaagtattaaaatatatggaagagaccggaaaacgcggtatcgttctcgccggacgtccataccacgttgacccggagatcaaccacggtattccggagcttatcacttcctatggaatcgccgttttaacagaagactctgtctcccatctgcatcagccggagcgtccgttgatcgttatggatcagtggatgtaccactcccgcctgtatgcggctgcaaactttgtaaagacaagagatgacttagacctgatccagttgaactccttcggatgtggtcttgacgccgttaccaccgatcaggtcaacgatattctgaccagatcaggcaaaatctacacctgtctgaagatcgatgaggtcaacaacttaggtgctgccagaatccgtatccgttcactgatcgcagcgatccgcgtccgcgagaaaaagcagaccaaaagaacgatcgtgcctgcaagttatgagcgtgtggtatttacgaaggagatgcgcgaaaactacacgattctctgcccgcagatgtcaccgatccattttgaactgttagagccagctttcaacgctgccggatataatctggtcgtaccggatgttccagcaagggaatgtgtcgatgtcggattgaaattcgtcaataacgatgcctgctatccttccctgatcgttgtcggccagttgatggctgccgtaaaatccggcaaatacgatatgaacaagactgcgatcttaatctcccagaccggtggcggatgccgtgcaagtaactacatcggatttatccgccgtgctctggaaaaggcaggctacccgaatgttccggttatctccatcaacctgagcggtttagagagcaacccgggattcactttcactccaaagctcatccagcacggactttacgctctggaatttggtgatattttcctccgctgcttatatgcaacaagaccatacgaagctgttcccggttctgccaacgaactccatgagaaatggaaaaagaaaatcattgcctttattacacaggataagattttatcccataaaaaatacaagcagatgtgccgcgagatcatccgtgactttgataatctcccacgtcttgatgtgaagaaacctcgtgtcggcgttgtcggtgagatcttggtaaaattccacccggctgccaacaactatctggttgacctgttagaatccgagggagctgaggcggttgttcctgatcttaccgacttcctgctctactgcttctacaacaccggatttaaagcagataaccttggattcagccagaaatccaaacgaatcggacgccttggtattaagttctttgaatggttacgcagtgccgcagtggatgaatttaaaaagagtaaacactttactccgcctgcacacattgatgaccttgcaaaatatgcaagagagatcgtatccgagggtaaccagaccggtgagggctggttcttaaccggagaaatgttagagctgatccacaccggaactcctaacatcgtctgcacgcagccatttgcctgcctgccgaatcatgttgtaggaaaaggtgttatcaaggaattgcggcaccgctatccggaatccaacattgttgcaatcgactacgatccgggtgcaagtgaagtaaaccagttgaaccgtatcaaactgatgctctcaactgcaaataagaacctgaaaaaagagttagcgaattaatacgaaaaaactcgaaattgtgtttgttttatgttataatttataatatagtatctattcagatccaaggcaattttcataaatttgcgaacgtgtgctgaatagatatataacatctgataattacagtgagtttatcatgtgcattgggcgacatccataaaatgtcagcggggaatacgaatgaaaaacgataaggcaaacaataacgaacaacttttctgggagggaatcaatcagctttttcctgatatgataaaagcgatcacttccctttccagaaaatcatatctctcgatcaccaaccttagaaccggtatcacctggtggtcggaacaggtaatggattatttcggactggaagaaaattataccatgcgtggcatggaaaagagtaagcgcaagcttcatccagaagacattgccacttttaaaaaggggttcaaagaccgtgttgccggaaaaaatctcgacaaaggctgggaataccgcatccaggacggagaagattcctacaatctcttccgcgcaacagcgcgtatgctctacgataacgagcaaaaaccttttttcatagttatccgctacgataactatggtatctcggatgaagtggactctgtcacaggtctttatacagagcctgccctaaattaccgcattacacagttattagaagccaaaagtccttctgccctgttaaagatcggactcgatcagttcagccatatcaacgttatgtatagtgttgcttttgcggacaagattttaaataaggttgcccagaatctgttacatatggtacgcaatatcggttctgcctatcgtttatccggtgccaaattcgttctggtgttggataaaatatcaaaaaccgaacttcgcgatatttttgatttcatagaagatgcattggcaaataacattgaggtgaacggaaaacggattccaatcaaaatttctgctggggcaatcttcttagaaccttatatgaaagaaaccaacgctgtccggagccgtctgacctatgcacagaatcactcccgctatgaacaccatggcgatcttgtcatctttaatgatgagatctgtggcaataacgaggaacagtttgagttaatcggattgatccatcagtgtgcaaccaatcacttcgagggattccgtctgttctatcagccgattgccgatacgaaaacaggcaagatccgtggtatggaagcactgatccgctgggaacttgagccttatggactggtttctccgggtgttttcatggaatggctggaagaagacccatgtatcttcgatcttggaaactggattcttcgtaccgctttggacgatattggaaaaatacgtgacaaaattccgcattgttttgtaaatgtcaacgtctcagctgcacagttagcacgcaaagaatttcgtgattctgttatgacgattttaaaggaaaccggagcaaaaccggaggaattatgtctcgagctcacagaacgatgccgaaatctcgacgttgattttctaaaaggtgaggtagatttcttccactcacagggaattaaaattgcactggatgattttggaaccggtaacagttccttaagtcttgcattggaacttccatttgatgagttgaaggtcgatatgagttttattaaagatatcaaacagaaaccgcagaatcaggcaatggtacagtccattgtagattatgcgaaccgcaccaataccgagacatgcattgaaggaatcgaaaatcaggacgtcagcgattacatttataagttcggtgccacctggcatcagggttacttctattccaaacctgtgccgattgatcagtttgaagcactgctcgatgcaccttgcgcataaaaaaacaatttacatttctgataaatcttctcttactggataatcagtaaagaagatttatcaaatgtaaattgtttttttatttcaaaatttctcttttatataaaatccacgaaatcaaggctgaaatgatctctgtgatccagaacgcgtgccatacacctgttgctcccagaaaacggcttaacacaaatgccaatggaagaatgactacaatatagcgaagtaatgaaatgatcagggattctttgccctttcccagtccttctaacgcgcccgataccgtcactgagaccgatgatacgataaagcctatactgatcagccggagggcttccctgcccaatgcgatcgtctcaggattacctgtgaacagcccgatcagcgactgtggcaccgccatacacaggatcgtgccaatcaccatgacaactgcaatcagaaacagcgccgactggaaaatttctttgacacgttttgactctcctgccccataattatagccaatcagcggtctcataccctgtacgacaccatttcctgtcagatataaaaatgtctgcaatttaaaatacgctcccaacacaagaacatagcttgcagaatatacggtcaggattgcattcagggctgacacctgaaccgagggcagtgccagacttaacgttgcagggattccaatggaatatacttttttgcaaagctgcgtttccggtttcatatcttttactttcacttttgccgggattggttttaagtaatacatcagcagataacctgctaatgacacgacctgtccgattccggttgcaagcgcagcaccctcaatccccatttccgggaaaatcccgattccaaaaataaacagaggatcgagcacaatattcgtcacgcatccgaccagcatgcaaaacatcgatgtcttcatacgaccgactgcctgaaatattttttcaaaacaaagtcctgctgcatttggaactgcaaataaaaaaacaatattcgaatactgtactcccattccaacaattccctcatccgctgtaaacatccgtagaaataccggcataaccgcaatgcatcctactgcaaggatcactccgtgtatcatattgagtaacattccaagagatgctgtcttattcgccagttcctgcttttttgctccgagataatatgccattgttgcattgataccgatcgcgaaaccgatcaccacagcattcacaagattctgtaacggatatactaacgacaatgctgtcattgcatcctcgctgatcctcgccacaaaataactgtctataatattatataatgcattcaccagcatggaaaatgtcatcggcaatgccattgaaataaccaatggcataaccggtttttccttcataaattcctgattcatctgttcttcctctctacgatccttacttttttgttgtgcgataacgccatttccacattgtcacaatctatggttcaactcattttagcgcaaaaaaatccacacaaccgatcatctcagttgtgtggcgaaaaatagagctctctgctccagaaaagtccactccattcatggttttggatctatatgttatttatccttctgattcgctttctgaatcaataagagaatatcagaaagttcctcttctgtcaactgcgtatattctgcaagttctgacagtgtagcttccctgcccttctcgtctgcgaggtatttctttgcttcattcactaaagccagctttccgaccatagctttctcgtcttcatcctcgccttcctctgcaagaatagatgatttcatggcttcctcaacagcattctgcaattccgcctcaacatctgttttctcctgacttccgcaaagctccgtcagttttaaaaacaatgccatgtttccttcctgaataacatcctcaaatccttccgagctcactgcaagcttctttgccagttctaatactttgatcatccagctgtcagaaatcgtatggatgaccgattcatctcctgccaacagcttctggtacatttcctctattttcgtttccgaatacaccggaagactgctgatctcctcaagatacatctgaaacatcttagattccggcaggcagtctgccttttttgtttcagcctcttttttatcggaatcgctctgcatgaatacagacgcatcggttgtatcctgccactctgccgtttcctgtgcttcttctgcctctgtttcttctgcttcctcttcctctgcatcttcttcctcatgcggtgtcaaaaggaattctaaaaccatgttttcctgctgctcgttaagttccatttctttgaaatagcctaggatctcctctttcgataacggtgttgcagatgtgcggataatctcagccacttcgtggattgtctctgtaaatacactctgatctaacattgtctctcctgttttcttctcattaaaccttgtgttttgcctctttttcatcaatatcaactaaaataatatccggtccgatcttcacaatcttgcaccacggaataaacaattcgaaatccctgcccaaacagccaaaccattttcccggtccgggtacgatcaacgcacggattgttccgttacactcatcgatatcaagatcatgaacgtttccaagacatttgcagtcgcacatattgatcacttctttttctgccaagtcacaaaagcgcataccattctccgaaacatcctctcggaaaatgatatgcgttttttccctttttttgcaagtccgctggcaaaattttgagtaacacttttcctgtcttatacgttaaagcggaataagataacatctccgtctttgaccacgtactcttttccttccatacccacgattcctttttcacgggctgctgcaaggcttccattatctaaaagatcctgataatttacaacctcagctttgataaatccacgctcaaaatcggtatggatcttgccggctgcctgtggcgcttttgtacctttcttaatggtccatgcacgacattcatcctctcctgcggtcaaaaagctgatcagtccaagcaggctgtagcttgctgccaccagcttgtcaagtccgctggatgccacaccgagatcatctaaatactctttcttttcttcctcagaaagttctgcgagttcctgctcgatctgtgcacagattacgaatacttctgcaccttcctcttttgccatctctcttacttttgcaacgtgcagattggaagcaccgtcatctgcaagatcgtcctctgcaacatttgctgcgtaaattgtcggctttgcagtcagaagattgtatcctttaaaccagatctgtgcgtcctcatcatcaggtacttcaaaagatcttgccattttgccggcttcaagatgagccttgactgcttctaccagttcaagctcttttgcgagtgtcttgtccattcttgcctgtttggaaatcttggcaattcttctgtcaaggatctcaatatcagagaagatcagttccagattgatcgtctcaatatctcttgcaggatcgattgatccgtctacatggataatgttagtatcctcaaaacaacgtactacgtgtacgattgcatctacttcacggatgtttgcaaggaactggtttccaagtccctcacccttgctggctccttttacaagacctgcgatatctacaaattcgattgtggcaggtgttactttcttcgtgtgatacagttctccaagttttacaattctctcatccggtacggaaacgattccgacgttcggatcaattgttgcaaatggatagtttgctgagagcgctcctgctttggtcagtgaattaaataaggtagactttccaacgtttggaagtccgacgattccgagtttcataatgtatgtttctccttctaaaagtattcattttcataattgatacagcattatatagtgtaacacattagagctaaaatgtacatttctttcttatgtacaaggtttttctataaattatatgctttttcaaaatccactggcataaacggatgtgtattaaatcttccgccaaaacggtagctttaattgatcacacgaagtttgatacaacgtcgatttcaagctatgcttctgtggatgatattcatttactgatcacagacaatggactttccagaaacaccaaagaaatttatgagaaagcaggaatcgaccttttaatcgctggagaataaattttccgcacagctttgattccatttacaaaaacagcagaactgcccgatatgatgcagttctgctgttttttagtctcctgcctcaatcacaattaagattccctgctcgaattttattgtggcacttgcctcaataatttcattgctcacgccaagtgaacagaatccctttaaatcataacgatccaacggatacttaaatccggtcagtgtaagtccttttactacatttgtatatggaatcagggaaacaaattttccaaactgtttttcccgttccagtgtgattccggaatcaatcatccgaacccggtttcgttcatccacaatctggattgggatatgattctgcaacccgattccaagaagttcgatatttccaagcatatgatcgattcttgttcctgttgcgcctagaagcgtgattttttctgctccaagtgcaattgctttccggattgccgattctgtatcggtgtcatctttgactggattcaattttatccatgaaatatccgtctgccctttgaaatattcgagtgcctcacccgatgcggaatcaaaatctccaatgatccaatccggctttaatcccgttctgtaaaaaaaattcattccggaatccgctgcaatgcaaagatccggtttttcctgtactataaattcttttgcaaatccgtcctctatatgtccccctacaacaataacgcaatccgtcatattttccttacctcatatcatcaaaatatatccaatttcacactctgagtcaaaactctgtaatcatctatttcatgtaaaaagactgctgcacaatgacttttcattcttatgcaacagctcagttatttactcatttaaaatatctaaaaaacgttccacattctctgcaatatcgcccttgaatacagcacttccagccacaataatgttcgctccggcatccataacctcagtcacgttttcgaggttcacaccgccgtctacctctatgtcgatcttaagccccttctcgtcgatcattttctttaaggctctcactttttccgccgtataaggaatcagtttctgtccgccaaagcccggatttacggtcatgatcagcaccatatctactttcgggagtacccactcaatcgcagataacggcgttgccggattgagcgcaacacctgcaagcagtcccttctccttgattgcctcgatcgtgcggtctaaatgtttgcatgcctctgcatgcacggtaatgagatccgcgcctgcctccgcaaggtcatcgatataccttcccggctcctcgatcatcagatgtacatcaaaaatacggtcgctgcagtctctgatactctttatgactggcattccaaatgaaatgcttggcacaaacataccatccatcacatcgatatgcacatactgtgcacctgcctcgtccaaaattttcacctgctcccccagatttgcaaaatctgcggataaaatagaaggtgataaacaattcataactttttcctccaaaataatctaaaaacagtaatctgtcatcaatattttttaacgtcttttaattcttcataaagcagcttgtagttctcatagcgcaaaggactgatattcccctctgccaatgcctctttcacaccacaatccggttcattgatatgactgcagcccttgaatctgcaataaggttcatattctttaaattcaggataaaactcctgaaggtcttccttttcaaatcccggtatataaagcgtactaaagccaggggtatccataatataagtgtccgccgcgattggaataatctcagaatgacgtgttgtatgttttccacgctcgatttttctgctgatgctgcctgtctccatctgcacatttggctggagacggttcaccagagatgattttccaacaccggaaggacctgctaccgcagttgtctttccatctaacagcgcatgcagctcccggattccctcctctttttccgcactggtgtagagaacggagtagccacactttttgtagacacctgcaaattcctcaatctccgattcctctaacagatcttttttattaaaacagatcgtcacaggtactttctgatattccatcatgatcaggaaacggtctaacagattaaaattcggctgtggcttcgccgccgcaaaaatgatcaatgccagatcaatattggcaaccgccgggcgaatcagttcatttttccgcggaagaatcttttcgatattccctttttttgtttcttcgtcaacaatcgcaatttctacatcatccccgactaacggtttgatcttctgattgcggaatgcaccttttgccttacattcataaattccggattctcctacgtgaacgtagtagaacccggaaattccttttacaatctttccctgcatatattaccttttgttgtaactattctgccttaaatgagataggcgatacgatctgtgaagatccaagctgctgcccatctgctccaagccagtcaatctttaatgatccgctggacgctaacattcctgatttggaaatgctcaatccgccgtccccgaataaggagatagactgattcgtccactgctctaatatattaccatttccgtctgctccgtcatacagatagatattagctgctgccacggagtcattgtctggttttttgatgttcagattgatcttataagtggtcggtgttacttcctgtgcaggttctgcacccatgcttaccacaaaatcaacggctgttccagcgtcaaccgcggtatctgcaaccggactctgggaaatgatctgtccgcttgcgacactgtcactgtatgcacttgtcacattgccgactgcaagacctacgttctggatagctgatcttgctgcatcctcggtaagtccagtcacacgcggaactgccacactcgttgcctctgcctgctctacgccgcggctgatcacgattttgacattatctcctgccttggcaagtgttcccgcattcggactctgctcgattacatttccctgtgcaacactgtcactgtatgcataatctttcacaggtgtaaaacctgcatttgtcagtgtattataagccgttgtctcatccatacctgcaacagaaggaacggaaaactctccttttccgctgcttaaggtaacttccactgttgtattcgcctctgcctttgtcagtgcatccggtgtctggcttacgatctgtccctcatcatattggtcagatgcaacggttcctgcattcttcttgattccgagaccctttgcattgagctgctcttttgcctcgtcgaatgtaagacccttcagatccggcacttcaattccgtctgtctgggtttcggatgtctcagtgtttgctttgttagaagatcctccgaatttaaaatttccgaagaagcttaccagaataaaaatgatcagtgcgacaatgatgacaccggcagcaatccccataattgtgatcgccttatccattttcggattcatctcttcgagatcatcatcatcatatgcctcttcgtcatcctcatcatcctcttcgaagcggtcacgcttttcaaatttgtctctgtgattctgattatgtgacacaacatcctcatcgctgagataaatattgcttgtttcctgcttgatcttattgatctcttcttccccgatcacacgtgtcttctcctgggaaaccggtgcgatcacaacgaagtcttcatttgggctgatcaacgcttttcttaaatctgcaagcagcgctgtcatggactcatatcttctgtccggattcttctgcgtacattttaaaatgatcttctccatactgatcgggagatttggcgcatacgcactcggtggtacgatctcctcctgcagatgctgaatcgcgactgcaactgtagtatccccatcaaatggtactcttccggtcaccatctcatacatcacaataccaagtgaataaatatcgctcttgccgtccacaaagccatttctcgcctgttccggtgatgcataatgaacagaacccatgacatccgaactgatcgtgttggaagttgcggctcttgcaataccaaaatctgttacctttacttttccctctgtggaaataatgatgttctgaggtttgatatctctgtggataatgcccttattgtgggctgcctcaatacctctgcctacctgaatggcaatgctgacagcttctttgaatgtgagctgtccttttttctcaatataagtttttaaagtgattccttccacatactccatcacgatgtaatgcatgccattttcgctgcctacatcatagatgtttacaatattcggatgttctaatccggccgccgactgggcttccgtgcggaactttgtcacaaaattgacatcctccgaaaattccggtttcaatactttaatcgctacaaaacgtccaagtgtatgatctttcgctttgtatacatctgacattccgccagttcctatcttgtttacgatctcataacgatctccaacaaacataccttccgttaacattccttcacctcatcagaaaatggttctatcaatacaaccgtaatattatcttttccgccgttctcattggcagtatctattaatttttctgctttctcaacaatatccctctgtccgagcacgatcttcttgatctcttcatcctcgatcatgttcgtcagaccatccgagcacattaaaactgtgtcccccggtttcaactcaacctcaaaaaaatccacggacaactctggaacaacgcccaccgcccgtgtgatgatgttcttatccggatgatctttcgcatccgctttatccatctctcccaaacggaccatctcctctaccagagaatgatcccttgtgatctgcctgatagcttcgtgatttattaagtataaacgactgtcgcctacattggcaacatgcaggtgatcttctaccactgtggctgccaccacggtagttcccattcctgctttggcggtatctcttgccgcctcttccaaaagacctctgtttgccgcctcgacagcttccttcattgctgctaccggctccgtctgtccggatgtttcaatcgtctctacaatcttttctactgtgaatctggaagcatactcacccgctttgtgaccgcccatgccgtccgcaaccagaaaaaggttcggcagctttccaactgcgttctcagacgtatacatataatcctgattcatctcacgtcgccttccaatatgtgtcatggaaaacgtcttcatttaccaattcctgcctttcttactgctacacctgtgcatccctgccggaatgttttagaaactcttgttattttagcacatgaactgcaaaagaacaagtcaacttcccatataacgtttgcgaagctgcccacaggctccgtcaatatctcttcccatctctctgcggattgttgcagtgataccgtttttttccagtttattcttaaattctgtcgtcactctcatatccggctgcacgaaatcccgttccttgatcgggttcaccggaatcaggttcacatgacagttgatgccttttatcagtctgcatagatttttcacatcctcatctgtgtcgttcacaccgcctaccagactgtactcaaaagtaactctcctgcctgtctgttcaaaataatatttgcaggcatcaatcacctcatggatctcatacttattcgccaccggcatcaattccagtcgtttctcctgcgtggacgcatgcaaagacaacgccagcgtgatctgcagtttcttgtccgccagttcccgcatacgtggaacgattccacaggtggataccgtaagatttctctggctgatatgaagtccgttttcatctgtcagaagttcaatgaattttaacagattttcaaaattatccatcggctccccggttcccattacgaccacattggaaacacgctcgcctgtgtcccgcccgatatgatagatctggtctaacatctcagatggtgtcagtcctctcaccagtccgtctaatgtggatgcacagaatctgcatcccatacggcatccgacctgtgaggaaatacagaccgaattgccatgtttataacgcatgagaacactctcgatcacatttccgtcatctaacagaaacagatatttgcgtgttccgtcgattttggaaatctgtaccgcctcctgctttaaactgaccagatgacagttttctttcagcttttcgatcagtgccttagagatattggtcatctcatcaaaggacgccacctgtttcacatgcagccactgataaatctgctttgcacgaaaacccttctctccaagctgctccatgagcgctgtcaattctttcagattcaatgatttgatatctgttttttcctgttgctccataattctccttcatttcctgaaagtttgtgaaatctttcacgcttttttctgtaactttgcaaggaaaaatccatctccgtaagtttcctttggaaaaatctgctgcattttcataagctcaaattccggatgatgttctaaaaaccatgcgacattgtcttcattttccattttatccattgtgcaggtagaatataaaaggattccccctgcctttacatataagcagacagtgtctaacattttctgttgtaatacgacaagttccttttctgtttccagtgtcatcttatatttgatgtctgttttcttacgcatcacgccaagaccggaacatgggagatctgcgatcaccacgtctgcctttccaaccgatgcttcatctaacacggttgcatccttttgcacagcgcacatattagaaagctgatgcctctcaatattctcctgaatcagttccaccttgtaccctgtgagatccctcgcttctaccattccggtgccgtgaagcttctctgcaagatgtacgcttttgcctcccggtgccgcacagacatctatgacaaaatcattttccttcgggtcagccagttcagcaaccagcatagaactgatatcctgcacgtaaaaaagtccctcccggaaactttccagtctgtttaaatagtcaaacccaaaaatctggaaagcgtaatcaagctgcggtgcttcctcacagatgatcttctctgcctggacgccttctgctttcaagcgcatttccagttcttccggtgtaatctttgacagattcgtgcggattgtaagcggtgcctcttttaaaaatgcctgtaacacgtttttcgtctgctccatgccataatcagcgatccactgtgttacgatccattccggcatggaatagcgcacagacagatattctatcttattcgttttttcgtccggatatgtgatgtcatttaagttccggctgatattgcgcagcacgccattcacgaaaccgcttaaagaggcaaaaccttttctttttgccagctttactgcctcattgcacactgctgaatccggcacggaatccatatatttgagctgatacacactcatccgcaaaagattgcggatgactggtttcattttattcacttttactttagaaaactgattaatgatataatcgagttcgatcatatactggatagttccctcagacactcttgtgataaaagcacgatcctttttttccagatactggtacttatccagtacggaacggatcacaagatgactgtagctgccttccttcgtaacttccatcaggattcccaaaatcagttctctcgtattgacagaatcagtcacggtctcttcctccaaataacagtaccagacgcagtaactgtaaaatagctgcagctgcacttgccacataagtcagtgctgctgcttttaacacttttttcgtatatggaagttcgctgtcacttaaaatgccctgctctcccaaaatgcgaagtgccctgcttgatgcattaaactctaccggcaatgtcacaagctggaagatcactgcaaaagaaaaacagataattccaaggtttataagcactgctcctgtatttctggtaaagaataatccgatcaggatcaacggccacgcaagtgtcgaaccgagattggctgccggaacgattgctgtacgcagtgtcaatgggaaatagctgttctgatgctggattgcatgtccgcattcatgtgctgcaactcccactgccgcaacagatgttgaattgtatacagaatctgaaagatttaatgtctttgcagacggattgtaatggtctgtcagatttccggatacgtgctggatcgtcacatcataaatccctgctgaatttaagattctctgtgcagcctgtgcccctgtcataccggatgcactccggtaccgggaatacttattgtaagttgatttcactcttgcggaagcgatcatacagatcactgctccgatgatcacaagaaaatacgttgggtcaaatccgtaataataatatggcatatgaatcatcctttcttcgttaacaacgttttaaaaaactgccctctgtcacatgataacctcttaagaaggcatctgttgtcattcgtttctttccttctaactgtacctctaataatgctaatactccgtttccggtctggacttccagttcatctttggtcacttttaaaatgcagcccggtgccgctttcacctcatgtgagattacttttgcacgccagattttcagattcttgtcatcaatccttgtgtatgcacttggccacggattcaggccacgtaccagacgctcgatcacctctgcatctttggaccagtcaatgcttcccatttctttctggatttttccggtgtgggttgcaagcgcatcatcctgcggtgtgtaaactgcggttccattttcaattgcttccattgttttcacacagagttttgcaccgacttcggataatttatcaaacaggcttccgcctgtctcattctcatcgacgatcacttcctgcttcatgatcatgtctccggtatcaagtccctcatccatgcgcatggtagtcacaccggtaacctgctcaccgtttaacactgcccactggattggcgctgcaccacggtattttggcagcagggaggcatgtacattcacgcatccaaatcgtggcatgtcaaggattgccttcggaatgatctgcccaaaagcctccacaatgatgatgtctggctgatactgtcttaaatagtctacgcactctgccgcacgtattttctccggctgatacacttcgattccatgtgcaacagcacattccttgaccggtgtatattttaatgccttgcttctgccaactgctttatccggctgtgaaacaacaagcacaacctcatgtcctgcctttataatctcctctagtgtacccactgcaaaatccggggttcccataaatataactctcatgattctctcctcgcttccggtttctttctatcgcttccctctgcgcctattcctcttcctcgtaggtgacatcatgaagctgtccttccaccttttccacgtaaagatgtccgtctaaatgatcgatctcatggcacatggctctcgccattaactctgtgccctctatctcgtattcttccatgttttcgtcaaatgcatgcaccttcacataatttggtcttgtgacctgtcctgcttttcccggaatacttaagcatccctcgtcgccggtctgctcaccggacgtttccaagatcaccggatttatcatcacgaccggaccttcgccaatgtcgatcacaacgattctttttaaaatgccgacctgaggtgctgcaagtcccacaccattcgcctcatacatcgtatctaacatgtcctcgatcagttcgcctgtgcgcggtgtcatctcctttaccggtttacaaactttttctaatacaggatctccctgtacacggattgttctaagtgccataatgtcctccttgtttttaaaaaccactcattggattaaagtcaaactgtacgaccgtatctttaaatgccctgttgtcacgcatataatgctccagccggtctttcatctcaaccagtgtctgataatcttttgtttttatataaatcacctttttatagatgtcatttacttttgcaattgccggatctgccggtcctaccacaaaaacccgtttctttttgaaatcctcccctgctgtctctgccgcagatttcagttcctcctgccatgcgtcaatctccattaccagaagcgccgctgaatcataggctgtctgctcccacttcgaggcacacaggatgacaagcatattccagactggtggatacaaaagcatactgcggtattccatttcctgctcataaaatgcttcgtagtcctgatcttttgccgtctgcacactgtaatgatccggctgataggtctgtatcacgacctcgcccggctcactgccacgcccggctctgccagccgcctgtgtcagcagttcaaatgtgcgctctgccgcgtggtaatcgctcacatacaaagataaatctgccgcaagcacaccgactaatgtcacatttggaaaatcgtgtcccttgacgatcatctgtgttccgatcaggatatctgcctcctgattagcaaaagcggacagaatctgttcgtgtccttccttattccgggtggtatccatatccatgcgcagcacccgtgcctttgggaaacgttcttttacgatcatctcgattttctgcgttcctgccttaaaaccgctgatgtatttcgagccgcaggaaggacatgttttcggcattggctcctcatatccacagtaatgacagaccatttttccttccggatgctgtcttgtcacatgctggcttaaagacacatcgcaatgcggacattttaacacatgaccgcaggctctgcaagagacaaagcctgcaacccctctccggttgataaaaagcatcatctgctgtcccttcttaagccggtcctccataagctcctgaagcttcacacttaagatagacctgtttcctgctttcagttcctcccggagatctaccacatccactttcggaagcggtttttccgccacacggtgttttaattctaaaagctggtattcccctgttttcgctttgtaatagctttccaccgaaggggttgccgatccgagcacaacgctcgcaccgcacattctcgcccgctcgattgcagtttcccttgcatgataccttgggagtgtctcgcttttataactgctctcatgttcttcgtctataataataagccctaattttgaaaatggtgtgaacaaagctgatcttggtccgatcataatatccacatccccgttttttgcccgctcaaactggtcaaaacgctctcctgccgacagtcttgagttcatgatcgatacccggtctccaaaacggttgtaaaaccgcatgactgtctgaaaagtcagcgcgatctcagggattaagacgattgcctgttttccctgctctaaaatgtgggcaatcagttccatataaacttccgtctttccgcttccggtcacgcccttgaccagatatgttttttggatgccctgtttttgcttgcttataaccgcatccacaactgcctgctgttcctcgtttaaagtaagatgatatcccttgctgtctaaatgcgacaccggatttctataagaacgctcgctttgaatctccacaatccccatcgtctctaacgctcgtatcaccgttcccgagacattcaacttctgcgtgatgatactctgatccatctgtggactctcgatcagtgcttctaacagtcttgcacgcgccgtctgatgtttccgttcaaactctgccagctggtttttcgcctcgatgtttcctaactttaagcgcacacttttatgttcgacggcattgctctttttcttgatcgggataactgtttttaatgcatggttcatcgttgctccgtaatttttcttcatccagcctgcaagtgcgatcaactggctttcgatcggtacgctgtctgtcacaattccggtaatatttttgatctttaaaacttcaaattccggctcatccgtcagttccaccacataccctttgatactgcgcgttccaaacggaactaaaacctgcatcccaagtttcagtttttccttcattgcttccgggattctgtactgaaacgttttatctaatttttcattgaaaatatcaacaataatatttgcgtattccgccatccagtacctcctgtacgattcttctgtcgtctaacggatatcggattcctttgatctcctgataactctcatgcccttttccggcaagaacgataatatcccttttttctgccattccaacggcatattctactgctgccctgcggtcagcgatttttatgtaatcgggcttttttccttcccgtactgttccaagcagtccgtcctcaatctgattcatgatgcgctctggatcttcccacctcggattatccgaagtgataatggtaaaatccgccagccgccctgctgtctctcccatctgataccgtcttaacaccgaacggtttccaccacagccgaaaatgacgatcagccgcgatggttcgaattttttcagcgtctgcaataaattccggagactcatctcattatgcgcataatcgatcagaaatacatagtctgcacctgatgtcatattctggcatcttccgggcaccacctgttttgataatgcctcttttatctgctcccacgtcaccttaaaatgccccgccacggaaattgcagcaagtgcattgtaaacgttaaactgccccggaagctgcatggtaagcgctatcttctgccattctttttttactgtaaaatggctttgcagactgccctctgtcatctcataccactctccctctgccatcacatccgacggatgccggattgcaaaggtttccacctcacaggtatgtcctgcaagtatcttattcacattcggatcatcctgattcacaatgccaatgccacattgacgcattaatctgcttttacaatacagatattcggaaaaagtcgcatgctcgccctttccgatatgatccggctcgatattcaaaaaaactccgatatcgaaggaaacatctgcggtacgctgcagcgcgattccctgcgaggatacttccattacacagcagtcacattcctgcgccaccatatccgcaagcagtctgtggatctcgcaggattccggcgttgtgttgatcatcggctgctccgtgcttccattataggagcagattgttccgatcattcccacccggtaaccggcttccctcaaaatgccagccaccagaaaagctgttgtcgtctttccattggttcctgtgatgccgatcatcttcattttttctgccggataatcaaaaaaagcggcggagagcgcggaaagcgcttttcttgtatcccttaccgtcaccacgcagatgtgtctctcatggatcagttccgtcacattcactttcatatgttcggtcagaatcaccggacctgaccggctctcgatcacataaccgtcatccacgacaagcacagccgctccgcgttctactgcctgcggaagatattcatgaccgttattgcggtatccatttatgcaaacaaaaagggagccttcctttactttttcagaatgacaacagatatccgttatcacccggtcatcgtctccccttacactttcgtatgaaatctcttttaacagactgcgtaataattgcatactgctcccctgcctaatggcagaatgtactttttttattatatgccaagagaggggattttacaagttgtccgctacaggttgtgtagtaaaactctattggggtttataaaaaattgtgctgcattaacaaaattttcgaagacacgctcccgctacgtgtcgctcgcagcggtactaaaacgccacccatgtcttttattgctgataaatcagcacaaaatccatgtctgccgtttaagtaccggcggctccccagtgtcttctcaagcttttgtcaatgtagcacaatttaatttacacctcggagagttttacaatctacgaattggagcaactgtaaaatcagttgatgccattttttgaaagaatttatacataattccgacggatttgtggaatgttatatatatcattttaagctctggatttcatcaaatagacaattgtgaaacttatagatagactagcgagtattgtgaaaaattgacaaaagcttgagaagacactgaggagcggtcggttcttagaaggcaggaatgacattaagtcatgactggcttcttagtaccgttaccagcgacacgtagcgaaagcgtgtcttcgaaaattttgttaatttatcacaatttttataacctaaatttgagtttcgcaattgtctatattcatcaaaaacacacagggaggatttgtatgcggcgaaatttttttatctgtggactcacgggctggtgcctcgaaattctttttacctccatcggcaattgcagccggcatgacctgcgtctgatcggtcagacttctatctggatgtttccgatctatggcatggcatgtgtgatcaaaccactatataaatatctgaaaaatcttcctgttttattccggggatgcatttactctgccggtattttctgttttgaatacttaagtggttccctgctaaaaaaacaccacctatgcccttgggattacagcaaagctcccgcaaacataaatggtgtcatccgtcttgattatgcaccggtgtggatggctgccggactgatctttgaacgaatcctttcaaaatgattactcccaatctccaccccatttttaccgtttaatcatccagcgcgtctgataaatcctgtacagctccgatgtctagtgtatttaaggtgcggcgtttcatgcgtgccgcctctgacgctttcaaaagatattttttgatctcttttgctttcttaacgtggatcagctttaattcggaatctgtcacatctccggtataacaggtgatcgttccaagtccgaaaatgcgctctagcagtgttgttgtcagcttcacatcctgtactttatacatataacagtcattttcctcggttttcagcagaccttcatcgattgttaatgtacttggtgtgatcgtatacttggtaaatgtccacggcagaccaaaaaataacagtctcttccgctcacagtattttacttcatcctcatctacatcattcattgtcttaatatcttcagccatgtgctactccctctccttatcggattgattttcatttttatgattatttgattataactttttcacattcaaactgcaacacaaaaaggcggataccctgcaaaaatatctgaaaattttcctgttttgttccaatataacgtaaataatttttctcttgaatttgcaaaatgattattatatgatagtaaaaatgcctgagagaaatatcactatttcttataaaaaagcaggtatttataaggaggtttatatgcgtcatttaatgagtccattagacttctccgtcgaagagttagacaagctcttagaccttgcaaatgatattgagaagtttcctggtaagtatgcccatgcatgtgatggcaaaaaacttgcaacatgtttttatgagccaagtacacgaacaagacttagttttgaagctgccatgttaaatcttggtggttctgttttaggtttttccgatgcagcctgttcttctgcatccaaaggtgaaagcgtttctgatacgatccggattatttcctgttacgcagatatctgtgctatgcgtcatccaaaggaaggtgcacctcttgtagcctcccaaaaatcccgaattccagtaattaatgccggcgacggtggtcatcagcatcctacccagacattgacggacttattgacgatccgttctttaaagggcagactttccaatatgacgatcggtctctgcggtgacttaaaattcggacggaccgtacactcactgatcaatgccttaatccgctaccctggaatcaaattcgtactcatctcaccggaagaattaaagattccaagttatatccgcgaagatgtattaagagccaacaacattccttttgaagaggtggaacgtttagaagatgccatgccggatcttgatattttgtacatgacacgtgtgcagaaggaacgtttcttcaatgaggaagattatgtacgtttgaaaaatttctatatcctgaccaaagccaaaatggaactcgcaaaagaagatatgttagtgcttcatccgcttcctcgtgtcaatgaaatttccgttgaagttgatgacgatccaagagcggcttactttaaacaggcacagtatggagtttatgtgagaatggcgttgattctgacactgcttggaattgatactacgaaactctaatataaatttttcgtgacaaagtcacagataggagtacacatgttaaatattagtggtattcaggaaggtttcgtcttagaccatattcaggcgggaatgagccttcagatttatcatgatctgaaattagaccagttagactgtacggttgctattattaaaaatgcaaagagtaataaaatgggcaagaaagatattttgaaagtggaatgcccgattgaagcattagaccttgatattttaggtttcattgaccacaatattacggtcaatgtcatcaaagattccaagattgtcgagaaaaaagagcttcatatgccaaagcaggtaaaaaatgtgatccgctgcaagaatcctcgctgtatcacttccatcgagcaggaacttgaccagattttcattcttaccgatgagcagaaagaaatttaccgctgcaagtattgcgaagaaaaatatacaaatccaaaccgcagataactatgaaaaccccttaaaataaagccagaccttacatggctattattttaaggggttttccatttcttctcatatgatctaaaacggtcttaagcaacagcagttgcacaacatatttaagaataaaagacttaagcaccagcttccggaactcgaatatggtctgtcgtaattgtcacccatattggtgtaccacgttccaccgtattctaagtgctgtaaaaactgacggtattcaaagttacttggctccatttccactgcgcggctggcatgctgcttggcaacgatattattaccggcaccctgatttgccatggcgctatagtaataccagcgtgcattccgctctgcaaatggaataccatttaaaacattcaatgcctccgcatagcagcggtttgcgatgtagttggcagccgcctgcatctgcacagaatcattcgttgtccggtatccctgatttccactgtaattataacggtaacttccgccaccagcagaagaagtattgtatccataacttccaccgaagcttccgccggactgtttttccttcatgatctggtcatacgcctgctgcacttccttgaacttctcctccgcctctgccttattcgggttattgatattggcatctgggtggtatttgcggcttagggcacgatatgctttttttatctcatcatccgaggctcccggcgaaataccgagcacctgatatggattcatcatatatttctcctgctactttttcttttcttctttttttcgctttgactttttctcttctagcttctttttcttcaactgaagatactcatacttgctccacacaccggaatagagaatatttctcaatatatccgcatgcagcaaaatcggcagacgctcaaacgattttgcacactctgacatcatgctggtcagcagtaatttgcagagagtatcaaactcctgatcattttctttttccatgtatacaagcggattatagcagttcttcttctgatctgcgtcataatcttcataggcgtccataagataaatgaacttgcccatataaaatcccaatgtccgcatctcttcctgccactcatcttctctccagcacatgatctcgccgagcatctcaccggtaagacctgccaccagatcaagattcgtctctttattcttctccacttccgccgtctttttcatgaattcttccaaagccttcacctgccttggatattttgacacgatacgagtataatccttatccagtatttttacaaacgcttttttcgtgtaggatttctcatccttccagtcatccagaagattctgatatgccagaatcagattcatgtctgctgcatattcggtcgcttcattgatatatgccgtccgtttcttcgtcgggtgcaacgggcaggtaaactcagtctctgtgttctcaagttcatacagccccgtcagcaggacgatcagaaatgtcagatcataacttaacagcatctgccccttcgttccgcagtttgtctttagtttctggcagagtccgcagtaatatgcctgatatatttttttgctttcttccgataattctttttgattgatattgatgtaaccaaacaatggaaatatctccttttattttcaactttttttcacgaactctgtcctgcatttcggacaggtaatgcagatctttcctctgccctttggcactcttaccttctgcttgcactgcggacatttgtaaaaccggtagatttttctctgtgccagatgctttttgaaccgatcccactttacggtcatctgatatctgtagttgagatatttctgattttctgcatatcttgcggaaatattctttgagaacattctccatgtggaatagatcatcaatgcgatcgccagccagtaaaaaataccaagacggctgaacatcgacaaaaaaagcaataccagtgcagcaatgctctgtgcctttgccagttcgtccgccccatatcttccaatcataaaacgctgtattttctctctcattgttccgacctcctatccaagtgattttatgttacgctctgaaagaagtccagtcaacacatctattgtctttttagaaacattttagatttccataatattttttctgcaatcatggaaaagggtttcttagccttttcccataaagcaaaaaaaagatgtcaccagacaccttttctatctaaaataagcaggacgataagccgggttatgtccgtctgctgacgcagacacgaatgatcatctttctagaatgactgttaccagccatttcaagcgacctacctaaagctggcgggccacgtcaacgcttttgttcggtcttgcttcgaatggggtttacatatgcccctcctgttaccaggaaggcggtagtctcttacactgcccttccacccttaccagattttaacagagttaaaatccgaagctgcttacgcagcttccgcagaacttgtcatgtgacaagttctgtggcggtatatttctgttgcactttccttggagtcgcctccaccggacgttatccggcattctgccctatgaagcccggactttcctcacctgcagcctttcggcatttgcagccgcgatcatttgtcctacttattttaaaaactgaaagaacgccgcaaaaactttgcgacgctccttaatatacactattcctttaattttcgcaagaaaatttttttcgcaagaaaatttttttcgcaagaaaattttttcaattgtatttatacattgaaacaacttccgccgataaactcacgcagaatggaattctggttgatcccatcgctcggcatcggaaggaaatagtccaggaatttcaacagacgctttgcctctaaatattccgggcagtctttgtcaatggcaaaaagcaacggttccgcatacattttaagaaccgccagttcgtagatgagcgcggagttaaacatcacatctgcaccttcctgaaatgggaaaatatacttttcttcccctctgcgcacagaatcccacatagcaatggtttcctttgcagaggttccgcgtgtccgtgcatcgcggacaatccgtcggatcagtcttccgtcagtagttggcagacagttgtgctcgtcaatgttcaactgcgtcagtgcactgatataaatcttaaacttgctctcgatcggcagggaataggacagcttatcattcagtccgtggattccctcgatgactaacacatcatcctttcccagtgtcataagcttatctttatattcccttcttcccgtcttgaaattaaaaataggaagattgactgtttttcctgccagcagttcattcatgtcatggttgaataattccacatccagcgcatccagacattcaagatccagttccccgttctcatctctcggacaggtatcccggtttctgtaataatcatccagcggaaacggatgcggattcagtccttttgctgcaagctggattgacagtctgtgggaaaaagttgtttttccggaagaagaaggtcctgcaatcataatgaacttccggtcttttgctgacacgatctgctctgcaagtctgccaatgcgctcctcaaacaacgcctcctgtgtcaaaattaactgctgggtttttccggctgcgatcgcatcatttaatgctccgatcgtatcgatctccagcatttttccccagtctctggaagtttttaaggtatggaacagcttttccgccggaacaaaaggtgcaacctcttttgtgttcttatccgggaataaaagcatgaatccttccgcataggaaataacatcataatagcgcagatatccggttgacggcaccataaagccataaaaataatccatgtaatgatccagttcataaatattgactctggaacttctgcggtaacagaacagcttctccttgtctgtcatgccaaggtcatgaaacagtgccactgcatcatccgtattgatactctccttgtggatttcaatatcagaaaccaccatttgatacatctcattttttaatttccggattttttcatccgatacctcaacaagcttctctgtgttttcttccctttttacaagttcacagtaataaccctgtccgattgaatattttacccggactgatacctgttcttttccccagagattgtacactgccttctgcattaaaagtgtcacacttctgcggtatgctttcttacctgtcttatccgcagttgtaagaaattcgaccgttccgtcctcatccgcacacttattcagttcccttaatcttgcattgtataaaacaagaactatatcatccggatatgtctcctgataatcctgtgcgatccgcagaaaacttgttcctgccggatactcttttttctccccaagaatggttaatgtaattgttttttcctgcatagtattatattcctccatatctgcaatattctcacacaatctgccaaaacctttcaaaaaacattctcctaaatcagaaaaatacgaaacctaacattatgattaagcttcgtatttttcaaaaaattactgctggatcaatgtcacgctgacggtaccagttcttaaatctgccactgccgaaatctgaagtggtgtattataaatattcacaaatttcaggtcaagataattacctgcgatcgtagcatcccttccctccggaagatatggaaccggaagtgagtgtggatgacgctctgttgccggaatgccgccatttaacattgcagaatacatggtagaagatacctgacagatacctccgcctgttcctgtggaatgtttaccactcacataaattggcgcttccacataaccgtttgctgccgttcttggtaaaattgttttgttaaaggaaaactcttcccctggctgaatgactacaccgttgattctggaagctgccactgcaatgttggttgctctggaagctctcggatcaaactttgttgtgcaggaaccacggacaatcgctgcctgtgctccctctccagccaagatcagtgtcgttgcatttctcccctctgctgcaccgtttgccgcataatgggcacagtaggatgcaaggtcattgccgaatgctgcctgaagatccgggtaattggctctgtaaattgcaacattgaaattagcgcagcctgatcttccctcataaatgccggaagatacaaaatgattgaacaacttctgtgcatcatatccaaacgccgcttgaagatccgggttggaattataataatattctgcatcaaatactgcctgatatgcacctgtattcgatgatttctttgctgcatttgccgtgacagtgcttccagacaacaacaccatgcacaatgcaatggataaaatctgtattactttctttttcataagaaactcccttctttggtatcatattatcccagaccatatgttactctggtaaattatggtaagataaatgcagtataacacttttaaggattttctacaatcgttccttcacgatatgcctgaagtaaattttcaagatcacggatattttcccgcatcacttttccattatctgtgtctgcaaccgttttccgtctcacaacatgctgcaccagaatcgtatgtgatacaatatcatttccttccgaaacagctttttccacggattcaaacggctcatgcgccgctaaaacaagtccgtaggaattatagattaaagtgtaccctgcaatccccgttttcggctgataggctttcgaaaagccgccgtcaatgatcagaagcttgcctccacattttaccggagactcgcctttttttgcctcgatcgggatatgcccgttgataatatgcgcctcctgaccggataacccaaactctgcgagaatcgcattcacgacttcttccttttctaataaagtgtaataaggatttttcggttctatgtgtgttgctttatcctccacaaaataccgctcgaaggtcgtcatcttatcttttccaaaaacaggcgaatttttattttcccagataaaccagagaatatcctgtcctttcgcacgttcctttggatcaatggcataataccctttccgcgcatagctctctaacacatcatacagttcttttccggcgtattccgttccataaatattcacttttgtaaaagttccgtcctcgttcagcggaacacagccatgatacagcagatttccattgtatacatgatacaggctgcccttggtaaaaagaaaacggacatgcttttgtaatttttcacagtttataaatgcggctgtcagacgctccatcacgtctgcctcgtccgcagataattcatacggatgttcccagtcgatcgtcggataattcaggtcacgaagctggtacttctttccctcaatctccaccgtgcccttctgaatatctatcttatcgagcagcagccggttctccatgccaaactccggatgtttctgtatcaactgtccttcgagtttgaactgcatgacggcaatcgccttatgcatcttctcatctaacatggcatcccgcacgtcgtattcttcttcccggtaatcgagtttaaaacaggtgcacggatctttgtcatagcggctcatggcaagtcttgccaacggtactaaattaattccatatccgtcttctaacaaattgagattgccatacttggcggaaatacggatcacattgcagatcagcgcctgacttcccgctgctgctcccatccacgaaatatcatggtttccccattggatatctacagaatgatgcgtcattaagatatccatgatcagattcggatatggtcctctgtcaaaaatgtcaccgaccacatgcagatgatccaccaccagcctgcggatcagattacagaatgcgatcactagctccgccgcccttccggtgcgtatcacggaacggatgatctcattataatatgcctcctgatcggagatatccggtcttccggtcagaagttcttcgatcacatatgcaaaatcttttggcagtgccttgcgcaccttagagcgggtatacttcgaagaagcacccttacagatccggatcagtcgatacaaagtgaccttgtaccagtcttccatattttcctctgttttcagcacctgctctaacttctgctccgggtaataaattaacgttgcgatcgcctttttctctgcctgactgattgcactcccgaactcatcctcgatctttctcttgatcgctcctgaaccattctttaatacatgttgaaactggtcatattctccgtggatatccgtgataaaatgctcggttcctttcggcaggctcaaaatcgcctgtaaattaataatctctgtcgcggctgctgccacggtcggatactgttttgcaagactcttcaaatagcgcaaatccgtctgttccatccgtcaccatcctgtttttattccgtgaatttttacactgcaaaaataattattctgccttgatcacatcactcatatcataaaatcctgccggttttcctgcaaggaattttgctgcctgtacagctcctttggcaaaaacagcttttgaatatgcagtatgcttaaattcgattacttcatcctgaccggcaaagatcacttcatgctctccgacaatgtttccaccgcggacggctgaaataccgatctcatacttgtctctcttttttctctcccggcttctgtcataaacatatgcgtacttttcatccagcgcctcattcatggaatctgccagtgccagagctgttccgctcggtgcatccagcttctgattgtggtgtttctccacgatctccatatcaaagcctgccggagccagtgtcagtgctgcttttttcaaaagttccattaacatattgataccaagtgacatattggctgattttaaaactgccacatgctcactgacctgttttgcttttgcaagctgctcctctgataaaccagttgtgcacaatacaaccggcacctgtttttcttcacaataaataagcagatcatccaccgcctttgcattggaaaaatcgatcacggcatctgccttcacgtcgcagacggaaatattcgggaataccgggtaatcattcttgattccgtcatacagatcgattcctgccacgatctcaatttccgggtcctccttgcacattgctgtgatcgtctgtcccatttttccattacatccatgcataattacttttgtcataatcctaagtcctgcctttcgtatcttcgttgttttttgatatatagtgaattgcgaaactcaactttatacaatgaaaggatatgaaaataaaacaaaattttcgaaaacacgctttcgctacgtgtcgctcgcaacggtactagcatgccagccatagctaacgccatgtctgccaagcaagaaccaatcgaacttgttcgattttggctcacccagtgttttctcaagcttttgtttcatcttcatattttaaatttacattttacatgagtttcgcagttatacaatattataatacataaaaaggagctgtgaaacagctccaatttttcatgataatagaatatccgccaagcgtacattccattatattaatccagaatgccatatgccttcatcgcatctgccaaaacggctgcattcgcatctgtcatctctgtaagtggagaacgaagtgttccgacttcttttcccatgaggtttaacgctttctttaccgggatcgggtttacctctgagaataaagcacttacaagcggctgtgcctctctctggatcttcatggctgtctttaagtctccgtcaaagaagctctggcacatgccatgtacttttgccggtgcgacattcgaccatacggaaataacaccgatcgcaccgatcgccataagcggaactacgattccatcctcaccggaataaaggtcgatcctgccatcggtcagatacattaactgtgatgcctgtgcaacacttcctgtcgcctctttgattgctacaacattctcaacctcattaaaaatctttgttgctgtctccggaagaatattgcatccggttcttccaggtacattatacatgatgatcggtaactttgtacactctgcaatttcagaataataacgtaccagaccgccctgtgtacatttattataataaggtgtcactgcaaggattccgtccgctcctgcttcctctgcttcctgtgtcagataaattgcttctcttgtgcagttcgaaccggaaccagccacaaccggtacacggtgttttgcaaattctactgctgctttgatcactttactgtgctcttccatggtcagtgtggaactctctcctgtcgttcctgcaatgatgattgcatctgtcccctggtcgatctgccattcgatcagttcctgtaacttttcgtaattgacttcttcgttttctttcatcggtgtgacgattgctacacctgctcctttaaaaatagacattgcattctcctcctatcgtcattatacgcactgcaattttttttgttaaaaatgttgctacagtaaagtaaaaaaagaccggctgacgagccggtctcaaaattctaatattatacgcattctgcatctttgcaaatctgcctagaatctgatagctccccatctcaaatgatctccattcagatgacagtcataaagttcttcactttatgcccaagtaatatgccttcaggctgcataccctttcggcgtactttccttttgcttcttatcaactgttcctgatacatccaaaaagcgactcataaagcacgcgacctctaccaagcaatattttcattgcgtaaatcataacaccatcttattccattgtcaatgcacgattcctcatccccataaattctactcttcatcttcaataaattccactttgctcacagaaacctcatatgccacgcgcttttctgtctctgtctcgctcagttttttcacatactccctgctctggatacgtccccatacctgaacatgccctccgacttcaaacccggatgcaaaccttgcatttcttccccagcagatgcatggaatataatctgattttccataagaacggttcaccgcgatcaaaaggtctgcaatctctcttccaagcggtgttttccggtaaatcggatctttacagatgtagccatccagaaaaatctggttcgtcttcatatcctcgtcaatctcatctaacaattccagttcccttacaaaaacggataaaacaagacggttctttttttcctcgtgccggttaaatgaccggaactgtcccataacatatatggtctgaccaatatagtcctcgttcacgtcaatgaggcgttctgagatcatcagtggtatgtaatccataaagttgctcagccggttgactgcgacatctaccacataaaagccctctccgtacacttcgtggctgaatctgaaatcagaaacaatctctcccacaattgacacctggttattttcaaaaattttatctgccatgaattttttctcccttcctcttatcaccggaatcgaccagtgatttgcctgacaactatggttttaccatttccttccagaaaaaatttcgtgtaacttgtcgataagttttttatattgttttttaaaaaaatattgctgcctacttgcgttcctgcaaaattgtgatagaatgtataagttcgagttaatttataagctatattaataggaaaagacactatttcggaatggttcgtttcttttccacacagaagaaagagagattttttatgaaacagaaacgtgaagacgtacgtaacatagcaatcatcgcccacgttgaccatggtaaaacaacattagtcgatgaacttttaaaacagagtggtgtattccgtgagaatcaggaagttgctgaacgtgtcatggactccaacgatattgagaaggaacgtggtatcacaatcctctccaaaaatacagcgatcacttacaaaggaacaaagatcaacatcatcgacactcctggccacgccgatttcggtggcgaggtagagcgtgtccttaaaatggtaaacggtgttatccttgtcgttgacgcatttgaaggtgttatgcctcagaccaaatttgttttgatgaaagctctggatttaaaactcccggttatcgtctgtgtcaacaaagtagaccgcccggaagcccgtccaaatgaagttgtggacgaagtattagagttatttatggatctggatgcctctgacgagcagttagactgcccattcctttttgcttccgcaagagatggttatgccgttcgtgaaatccacgaccttgtaaacaacaaaaaagatatgacaccattatttgaaaccattttagattacattcctgctccggaaggtgatcctgaagcaccgacacaggtactgatcagtaccattgattacaatgaatacgttggacgtatcggtatcggtaagatcgacaatggttccctgaaagtaaatcaggaagcggtcgtagtcaaccatcacgatcctgacaaaaagaaaaaagtccgcatcagcaaattatatgaatttgacggattaaataaagtagatgtcgaagaagcaaatattggttccatcgttgcaatttccggtattgctgatattcacatcggtgatacgatctgttctgtggagaacccggttgcgatcccattccagaagatctccgagccgactctttccatgaacttcatcgtaaatgacagtccattggcaggtcaggaaggaaagtttattacttcccgccacttaagagaccgtttattccgcgagttaaatacagacgtttcccttcgtgtagaggagaccgattccccggacagctacaaagtatcgggccgcggcgaattacatttatctgtattgattgaaaatatgcgtcgtgagggatatgagtttgccgtaagtaaggctgaagtattatatcacacagacgaaaacggcaagaaattagaacctatggaacttgcctatgtcgatgttccagatgagtataccggtgctgttatcgacaagttaagccagcgtaaaggtgaaatgatcaatatgaaacctctgaccggcggatatacaagacttgagttcaatatcccatcccgcggtctgatcggttacagaggcgaatttatgactgatactagaggtaatggtattatcaatactattttcaatggttatgatacttaccgcggagatattgcttaccgtcagctcggctccctgatcgcattcgaatccggcgaatctgttacttacggtctgttctccgcacaggatcgtggtactttatttatcggacctggtgaaaaagtatacgcaggtatggtcatcggttcctgctccagaaatgaggatatcgagttgaacgtatgtaagaagaaacatctgactaacacacgttcctcttccgcagatgaagccttaaccttagttccacctaagattttaagcttagagcaggcacttgacttcatcgatgtcgatgaattattagaggttactccgaaatcccttcgtatccgtaagagaattttggatccaactttaagaaaaagagcaaattttaagaaataagaggcggctctacgcctttcttccagaaactataaaaacctatgcaacattcaacgacaaacaggagaatatgtatgaaaaaaatatgtacatttttcggatttttgatatccatgtgtctgctgctgaatgtcggttttagctctttgtccgtaaagggcgcagctgccggaaatacagaacagacttctgatccaaacttcacaaatttaatcgtatttgcccgttttgcagatgaagatgaatttgtggatgatatttatcaaggtgcctctgtgcgggagatcatagataattcgtataatactgcctattattccgtgggcgattactaccggaatgcatccgcagacaaattgcgaatgaatagtctttatctgtttgataacggcggttccctgcagttgaaacatgaacggcggttactatgccggttacagtgcagataatccaatcggttataaaacaagtggtgaaaaagcctaccgcatgtacgagctgcgcactgattggtctgatgccataaacaaagctatccagaacggaaaccacattacgaattgcgatggcagccagacatacagttatgaggatcttgacaaaaaccgggatggaaagatcgattccattactgttatctataaaaacacgacacaaaatattgtgataaaccgctctgatccgctttggaactataaggattatgcagactatgtggagatcaatcttggcgatggcaggatgcttcaaagccaatattatgtacaggtcataaataactactcaactctgtataaggcaaacaatgatcaaaaaccgatcgtttccttgaagtctccgatccatgaaatggggcatatatttggtctgctggatttatacaattcatcaaatcaaacgccggtttatttcatgtctgccatggcaaatgccatctcacctgttccacagggactttcgatcaaagaaaaagaggctctgggatggacagaccctagtactctaaagacgatcaaagaaccaggcgaatacaaagtaaagctcagcggcacagccaccggtactgacgactgtatcggatataaagcaggcattccggaactgaacaggacactgtatctggaatacagaaacttctcaaccgatggtagtaaatatgataagtcagagaagcagctgaccaattcagaaacatcaaacataaaatccggtttggtctgttatctggcaaagtctgacatccgctttccaagcaatctgaatggaaaaccgggaaattgggcgctggaagttatgggcggtacacaatccactaaatctgatgcagcccttggcttaaatgattcgcttcaggttacagacaaactcaaagtgactgtcactgctatagacggggaagtccttacctttcaaatcgaaggggaaatggaacaacatgtccattccggtggacaggcgacctgtacgaaaaaagccgtctgtgaagaatgtgggaaggaatacggagaaatagatccaacatgccatttgaatctccagcgacagggctttaaagagccaacacaggaggaaaatggatataccggtgatctggtatgtacagattgtaacgccatagtagaagctggtgaggtcattgataaattaccagtcactccacctgaaggaaaaccggaaccggaaataccgcctgtatctcctgataataagccaccggtcatgctggaaggaaacaaaacagaagtaagtaaaaatccggacaatcactccagtgctgtatttcgttcagatgcatcctttgatacctttgtccgggtaatggtagataatattgaattagtgagggacagagactatactgcccgctccggaagtactatcataactttacttccatccttccttgccggtctttccgaaggagctcacaacattgccattgtatcaacaaccggaacggcaacggcggatttttctgtaatttcagatcctgccccggcgccaccagctccggtaccaccggcatccacacctgtgccaccggcatccggtaatacgaacactgatggttcatctgcagatactgtggctggttcggtttccggaactgcttctatagccggatctgccaatgtatctggtaacagttctttatctgataccgctcagatgaagaaagactcctccggcacagacataaaatcaccgcaatgtggagagaaaaactgtttcactctcttattggaagatttcatagaaatattaaaaaaagtattaatattcttaggtttttcatctaagatctgaaaaaacacacaggacagctcctatgttaagctgtcctgtgtgttttttttcaaaaataattgatatattttctgcacgtcataatccggtgcgttctgccgaagtatatcataaatctgctcaataactgacggattttcttctagcatatctgctgtttcagacacagaacatccttttttgtactttttcatgatctgctcgatcattttagatgctgcgccttctgctcttccttctgctcttccttctactcttccctccgcttcgcctttcgctcttccttccgcttcacctttcgctcttccttctgcttcaccctgtgccctcgcttccgcttcgcatttatgaaattggtctgcgaaaatttcttttattacatcactcatgtttccttcttcctccacttctttccagtttgcacgcatgacggtatctgccagtgcctggaacaattttgaatccctgtttttctcatattgttccataaataatttaatttctccaccggacttcaaattgttgcgaagtttattcagccagtaattattttcgattgacaattccggtacgataataagctgtattggaattgcatctccatagagataatagataccattttcgatatttttcacatttatatttctcttattctgaagatttcgtaacatttgccgcggataatgataacacacaaacgtaatcgtcagttcttctgctggaatctggttcactttctcgacttccgttttgtaaatacaggtataaccatagactttataaaaatcatcaatgttcaaatgatcttccggtgacttatactcgataatgttatgctgccggaaaatccttccaatatttttcctgatttttaccttcttctcgtttttgaccaacacatcgatctgcattggtttcttcgaaagcaaatgttccggctcaaaagtcagatactttgcctcttctcccagttcaatctgcaatgccgcatcaaacgcaggatgccattggattttttctccttctgtgttcaatcatgttccccctttatcataatagaatctgctgtgattttcaacgcataagaagcattttctatgttaaaaatataacaaaaaatgagaatctatatgcattgctgttcttcatcaaaatggaatctcgtgccgaaccggctgtgaacgttgagattatatccttccacctcaaattggttttggatttgcagacaagaaaaaataagatgctttatctgtctgcgactttgatgtgattccaagtataagggattgtgcggaagatgtcaatgataattatgaacacttctttcaaatctctttcaaaaaaactttcgatatcattcaactgaaaatctctacaacaagcattttttatgctaacatcactataaaactggagatatcattattgacatctccagctctaccaaaacaatatacaactttttgtctttatccaatattagatcttttttccaacgtatatacccaatcctttacctttttgatatatgcatctgaatctgttcctccatagccggcttttgctatatatgtaatacatgtatctatgtccggcgcatctgttcttttaagatatgaaattaattctgagtatctcgaattattaacaaaaactttgcaaatgcaattgcgtgtttccctcttccctcaaatttagcccatccgttcactccttttccaatatttcctaccggattagatgaatttgaataaatcatattagaccaattttgattactgctttgagtacttccagttgcccatcctgactctcctccccaaattgctaaaattagttttctcggcaaaccataacaactggtgtgtgcattcatcgcacttgccctaaatgcatctacaaatgcctgcactttatcatccgcatttgtattaggattaatgcctactttgtaatcaatagtaccatcttgacatactacttttgttaatgtaatttctttctttgccatttcttttttctcctttttttattgatttgcaaatctaataataaagaagaaaatttgtccctttttgtaaactaatttctaactaatttttacaatccagttaccattcttataaacattgctacttccttatccagccactccccataacccggtaattcccagactgtccagcttgcactatccatttcagactgcaccgccagatatccattatcgccctgtctgtaaattagataatccccatgtcctgtctctgtggttcctgtctcagaacgaacctgtttttgaacaactcttacccatgtatcatacccttcagtatcaatgatttcatcatattgctccaaatatcggctgctttccgcaatataaccattctcctcctgcacctgttcgattccttctgtattaattccagcaccaccccgcggtgctatccatgcaagtgcatttatgtcttgaacaattccggtaagttcaggcgtatccgtatcaaaaaactgaacttcattttcccagtttataatcacacgactggcagacgctctttcttcctgtttcttctgtgaaattaatttaacattatgaaccaaaaatctatcatctgaccactctaactctatttgcaattcctctggcagacgataaaacagtttctcatataaaattaatttttgatctctgacatctgctctccatgccatattttcttctttactcgtatcttccccatactccacaaaataactatcatacacttctctctcatcaacaggaattgtataaaactcctcaaaattcaaacatcggctggaaatgttcacttcatacttatgatttgtttttttacaagaaaccggaaacctaatttctgccgtctgattttccgtccattcgacatttttatatgttccattttcactcataaacactgctattttgcttccgttttccggataatcgctccccatatcctgcccaatatatacaatatccttcattccatccgcattaaaatcttctgtcagaatggatatcccaatccatgcgctctcaaatggtccaatttctaacaactccccacttccaaatatgattgcatacatttttctcccgtcctggagaaaatattgaagaactctgtcttcttgaccgtctccatcgaaatctctatgaacaaattctccttgtaatacatccaccaaatctaaatatccctcatagtcaaacagaaaatccacatatcccatcgatgttgtttcttctggaaattgtgatacagttcttccgtccattaactttggcttaactttctggcaagctaaaaggaaaagaatgaaaatcattatgacgatcaaagcactttgaatgaatcttttttttatattactttgtttcatatttacctcatttataatattgaaattatttttttagttttatttattataaaataaatatatatctttttcaatactgtataatctcaaatacatccgccagccaccagctccactgttaaaaaataatactgattttatctgtcatggctgcaattcaaacgtaaaaactgctcttttatctgttggctgaagttctactttatcttctccttctacttgtaaagtcattccgtccacgttcattccgatttcttcataagtcagcgctgcagctccaacattaatttttactcctttttttgtgccgtctttataatttgcagtacaggtaataaccactccatctacaagtttttgatatgctgctgccacttcctcctgtgtttttttcttttgttctacaatactgtcaaaatcagaaaacggaatttcatcattacaaaaggttacccacactccttctttctgctgattttcataggaaactgtgtattcaacaaaatcgtttatttcctgctgcatgacaatttctccattatcatcaaaaattggattgagatacccattgctattttcatccaatggctttccgctctcgacagcactctgaaaatcatcggtaatattttcacttatttcaaaatatcctttgttgatactgtaagttacactttctatattctcaccttcgcagtaaagtggcatatcaattttataacttgctatattcatatcgctgtccccattaatcgcataaccaaacctgtcattttgtgcgattgctaccggcttctgtgccgtcacttctgcctgtgccgccattactttcatggtaaacatattctctttttctgttgtcgtatgttcagccactgttgtttctttttcttcctgcggtctgttgagatagttgtttgttgtggatgcaacaataataatcgatgcacaggcagccattgctgcaaacaattttgttacttttaaatttttcttgctcatattagtttccctttccgattgaatctgtgaaaaggcgacatctgcttttttctgaacgatttctggcacttgaatatcactatttaaaatttcactcactttttttgacatgaatctcacctcatttttccttataataaacttccagcttttcccgtccacgttgtaaacgtgttttcacagtactttcaggaatttttaaaatgtcagaaatttctctgatacgatagccctcgctgtaaaaaagaatcataataatccggtatttttcatctaacgctgcgagtgcctcttttaattccagattatattcatcgcaggctgctggttcctcgtactcatccaaacaaatgatattctgatttttctttctcatatcatagcatttgttgatgaggattcttgtcatccatgttttaaaatactgtatcttcactaattgattcattttttcccagcatatcagaatcgtatctccgattgcatcggcaacatcttcatcattcatcaaaattgcatacgcaaccttatacatatccgtcatataaagctgcattaattctgtgaaagcttccgactcatgccttttcgctcttttcacaagatcttctgtttgttttttcataatgcttttctccacgcgcgcagtgaatgtaagacagtcgcttttcttcttttttatcttacatatattagacaacaaaatgtgtataaaagtctcataaagggactgtaaaataagtccataaataaaaaaagtgccagttccggcaaatgtcggttctggcgttctgtgctatctgctaatatatgtctcaaatgcgtccattccttcataagaaaaaaatccgtattgcattgcctcattgcacattccataacaggaaagtttctctggtctgacagtctcctcctctgaataataccatgacggccaccatatcagaaaatcttccgacaactgttctattggcgtttctggcatatataaagtaaaattctcaccattttccaaaccatatggctcatcttcttttagaaatctgtatccattttctatccacatctctggaatatccaatatctctaatttttctaaagacattgtataataatattgatcaatgcgctcaatatctgtaaatttgccctcaaactcacagattgctactgttccttttggaaaatctttctctgcgtatgcatcataatccgaatactctcctgaaaatgaaccatctctgtttaatcttaaatacgtccgccagccaccagctccactgttaaaaaataaatcttttggaaaatccgccggaagatcattatctgtattctgttgcattttatccgttaccgctgcattctttgcaacgtttcttttatcttcatcagagtgcaaaatacatatagataacattgttaatataaatacgcccattcccaatacacatatccatttcttttgctgtaccttattcatatccactcctcttctatttttataaatattatatgcctcttttgaataatccatttttatcattcatcacacataatttttctttcattttagaactcaaatcacttatcaccaaacttgttggcaataagtgatttttcttcatatagaacaatattttcctattccttttgttctatcgaaatctgttccatttttttctgaatttcatccacgctgtttctaatatcctcaacaacagcatatttttctgtcatatcagaaagtagtttctggtaatttacctctctctgatcctgcttttccactaatttttcattatttttaatcgtatacaaaaatagcgaaacaaaaagaagaacccagattccctgcgtggttgcagcttcaattaatgcctgttccaaatgcatcatctcctttcaaaatattaagaagacgattattacatgaatagaaactaccattagttataaagataacccccgctcacagttatactagatgaactaacattttcgacataaattttatatgttcctgcactgcccacttcaaacgcatgagaacacataccagagccatacacatagcgcagttttccatccggcataatcagaccataccgcacttcgttttcgaatggattgtttgaaagcgaaaccgtaatcatattctgtccgctaatacggatattctcccataccgcagcctcagatttccctaatttttgctccgtcaaatcaccattcccctgtggcagctgctcctcatttccatcatacacaattgtcactttggaagcgtcaaaattttcttcgtactcagtctcttccacaaccacatcctcaacttccactttcgtctgagcaaaaagtctttcatatcctgctttgaaaccctccccagatgccagtgtcgttgtggtgcagaccgcacacaagaacacgacaagtgtaataccgccaattcttttgaaatcgttttctttcttataattcttcatttgcagaatcctgcttttgaaattgttttttttccgaaatccggtgaccatcttcggcatccagagatgcgactgttctagaccatccaccgcaacggtgtaatattcctgcgcagtatatggatatgcggtttcactgcacacatagcggtcgcacgcaatctcgccccacatatcaatgcttcggagcagtccgttcatcatcggattgcaccagaatatcagttttaaaaaaatgcccatctttttcatttccagaatatgctgtctgatatggacaagttcgtgatacaggatcgttgtaagttctttttcttcatactcccgcaccggaaaaatgatttttttctgccgccaaccgatgacaatcggtgatgtcactgcatagttctggtacagttccacatttcctttcattcccagttcctgtattattttgttctttttggtttccggcaaacgaaagctgacgcttttctccaacactttttgaaatttcaaatattgaaatgcatattttgcgagattccagactgcacccacgatccatattcctgcgatcacacactgcacattgtaaataaacggtgtgcgcaaaaataatgttccataatatgctccgtgacttcccggaacatgggttgaaattttcagataactatacataattggaaaaataaaaaaagcttcgacaattccaagcatcggatagatgtatttcagttttttcctccgcgccatgttcttttttaatacactccaaaatccataggcaattgcacctgtgatggaattaagaaaaagaatatagaacatttcatttgaccatctcattcgtgtttctccataaattactttttctggctattatttcctttacctgttctgctgtagcgtcctctggaagttcaacattaatcgcatcgcaaagttcctgatcatatacaaattcgcttcctatatcttcataaatgcgaatttgagtatatggaatcattccctgcggtccagctcctgtttcatatatcgctccaattacaatgtcgtcttttccattaactcattttcatataaatttgtatcttctttctgattttgttctggaatgactgattctctctctgtgtctgttcctaaattattgtctgcacaagccgataacaaagtcattgccaatgctcctatcatcatacatctttttcttctcatgaactattttcctttataatttttatcctgctcaaattcgatgcaactatattatagatcccttaatatttattttacagtaactatgtttttagtttatagtatttttctctttcatgtaacaaaataacaataaaatttattttccggtttctatttcaaaaactgtttgcttcttaatatgtgatttgtaaatcaaatatcacacattgccatgttcattttaaaatttctcctaattcacagctttctattttcatctccggcatccagaaaatctgttttttccattcaagatattcttgttcatctaaatatttaacggattctccctgaccgacaatatatacttttccatcaccatctttatcatattcctctgggaaaacatcggaattaatcggaacattagtaatctgatctacgcttactttctccacaaactcctttttgttttcatcatactgatatacggaataaggccaaaaaccgtcctgatagtcactatacatcgaatgaagcggacttgccttaattactccgtgctcataataatcgcatccccctgcatatgcaaattcaagttcaaaaccatttttttcttccgaataccgatagacatattctgttatatctgccatataaaatcctactgtaaaaataagtaattctacagtgccatcaccgtccacatctgccaccgcaactttgttcgggcaataagcacgctccatatcttcccgaaaacgttccacatctacattactcttctgatgtccaaagcagtatctcccatccggtagaaatcccgttgtatccagtgttttgattgcattataatatgcctcattgatcttatcatcctccgaaaaacgaggtactttgcgtttcagtttctccatatcataatttttgtctatctcttccaataactctttattgcttcctaattcacaccaatctattttcatctccggcatccagaaaacctgtttttcccatgcaagatattctttttcatccatatacgcaacggattctccctgactgatgatatacacttttccatccccgtccttatcatattcctctggaaaattatctggattttccggggcttttggaatctcctctacactggctgtaagcacaaactcgtttttattttcatcatactgaaatacactatacggccaaaaatcatcctgatatataaaacctgagtaaagcggctttgccttaatcactccgttctgataataattacatcccgctgaatattcaaattcaagttcaaaagcatttttttcttctgaataccgatagacatattctgccgaatctctcacacaagttccttcaataaaaaatagtaattctgccgtaccatcgtcatccacatctgccaccgcaactctttccggactataatgctgtgccctctgttcctgaaaccgttccacatctgttctgccgtcctgctctatataaaagcagtatctcccatccggcagaaatcccgttgtatccagtgtcttgattgcattataatatgtctcattgatcttatcatcctccgaaaaacgaggaactttacgtttcagtttctccatatcgtagtttttgtctatctcttccaataaagcttcattttttcttgcaagaacagcctcttcgctctggctctcctttcgctcaatgtattctctttgtttcctgttcaacatttcttcatcccagtccagcggaagaaactctgatgagcagactgtgtcaagctccgacacttcataatattgcggcaataccacacttttgtcgccgacacccattccacatgcatagaatgtgccgtctgttttttcaatgatcgtattatccacataatcattaccgaattcttccatatcggtaatatcatcctctttggctgaataattcaaaagtcctgtccacacgcgctgcacgtcttctgccacctgcaccggcgtttcaatcatcgtggctttatccgttccgcagtttccactaaagttgtatccccacgtccagagtgttccatcttccttcagtgcggcgtggttaaaccatccgcctgtgatcatcttcacatctgtcagaatctgctgtggcattgtgatacaatatcccgtactctgataattccagatcattccccatgtccagactgtaccatcctttttcaatgcaactacatcatcacgtccgcaccgcgcataactgacatcttccagcaaaagtgccggactggtgacataccgttttgtcggatatgccaaatcttccactggcatttctgtatgctgcaataacatataggtagaatcatttccaagaccataaagtttcccttcctccgtcagataaacaacaaaatctttctgggaatagtccacatgcacaacgtgttccgcgattttacttttttcctcatgaaattcctcgtccgcatacccaagtccaatctgcgcatactcattatgcccacttccccagagcacaccatcctcatcgatcgtgtacagattgaactggtcgccacaggatttcatataataatcttcgattgtctgtgcatccagccgcatatcgtaaagatcgcccgcgtcgaaagaatatcctgtctcttcttctgtctgcgtgtcactttccgtctgcgaaacagtttcgatggaattattttgagtttcattttcctccataaacaccattcctacaaaaataatgaccgccaatgcaatcgttccgcctgtgatgccgcacttgatacgattctctttatttgcaaagtactgtttgattttactgctcatactgctttccccctatactaatcttccacttaaccagatattcctatatgctaaagataatgtgtatgatgtttaaatctgtaaactatattttcagtttacagtattttatttttttatgcaagaaagtattaactatatttttagttttttattctttcaaaactatatacgaccaaagctaaatgtgataagataacatctgtattttaacaactttatgaaaaagaatttctataaagcacagcaacctatacgttaaattaagggagaaattaaccatgagaaaaaaatttttagtttgcatcttattaccatgctgcatattgattgctgcctgcggtcatacggctgatacgaaaaacgatcttttatcagaaaatataacatctgacaccgagacagatacccagacatctgactatgaaaaatacaacaactatggatcaacagaagaacaaatggatgaagcgataacagaaaccagtgaaactgcctcctcttcagaagaaaacgatttaccggaacaatctttgcagaaatacagcgatgactgggacgaaagccagattttggaagaactccaaaaacggaacacctatcacgactactgctccttttacccggagtatgtccgatatatggaaaatgtaatggaagtccgggatatttccatgaatatttacccgatttatgctacagatacaagatattatcaggcttccgactttagcaatgtccctccgttaatcattcatctggcaaaaaatgaaatctatgccagacacggatacatttttaaaaatcaggacttaaatgcttattttttgagccagctctggtatttaccggaattcgactcggaaacttttgattcctctgtattcaatgaatatgaaaacgcgaatcttcaattattggtacagcttgatacttacaaataaaaaattccctttctggtttctattcctcaagctatatgcttcttaataagtgatttgcaaatcaaatatcacacataaaggagaaaaattatggtagtaaaaaaaggagaaacaggaacctatgtaaaatggttacagcagggattgcacatcacaatgataattggctgttcttctttatttaattttatagttacaaatattatctattaccgtttcttatctgtggcatcttctcccgaatcagcgcaagaaatatttctctttcctcatgtgtcatatgctctttatcaatgaagataaaccctaaatgatccgcctgttcctgcgctttgcttatggacatatatagttttgtccttaaaagataaacctctttcaaatcataaaatttttgaaatgactcatatgaaatcttcttttcctgcttgaaatctctttgatataacaaatattcattcataaagatgcagcttccatggatttctctgattccatattgatcttgaaaccgttctatcgtcattttgcagactttctttttttctgcataccagaaaatgagcagaaaaactccacctccaagcataaatattgcctgtcctttttgaccatatctctcaaaaattacggtcaaaatccctacgccaaacactattgccccatacactgccttataccatggaaatatttttgaaaaatacttatcaaatatattgtaattaaaaattattttaaactgatgattgttttcactcttttccatattcctcgtttgcattcattttctcctaaatctttgttttataaacccaaaatttaatttttcattttatattttatactatacgaattgcttctttttttaattccattttcaacacatcctgaccgttattttggtaacttcacctgtgacattttttcccggacaacttcaatcagtacctcttcagactatttctgtaaattcagaatatttttttattttctaacgtccatatatactttgctgcaactcccacggtatttttaactgtggcatttttgttctgaaaagttctgcaagtttttctctgtctgctggcgaaattttgcttttttctacacaaaagagtaatccgcctctggttttaaaaatataataatgctggctggaataatattttttgattcttttgtatgcaatcttacaaacaatattattcaaatctcctgataccgcaatttcatcttcgagaaatgccactttttggaggtattcactactgccgtctttctttttgggacagatcatattaagttgtctttgataataaatgattaaaaatatcaccgttgctatcaaggaacctgccaacagtaagatcatcgcaatatcttttatcagcaaaaaaagaaacagacatatcgccagaaaacagaaaatgatttttataattgttataccaacgttcttcccggtctttttatatatttcctttgcgctttttcgattaattgtgcattcaaactccattttattcctcactccttttcccaacctgaaactatgctaatcctctggctcgcagccacggcatttttttgtgaatgatccgaagcagttcatcctgctgcgcaattgacatttgcaatttgtcaagaataataatatgttggtcctttgtctgaaaaataagaagatactttttctttcgtaattttttgatctcgccataaggaatttcaaaatttgtatcattgattacgtttgtcactctgatcacttctttttcaaaagataccacctgacgaaactgctttacatcatattgtttcaaaatgcagactgcttctctcctctggtcaacgaaatacaccacaatctccacgattgcccaaatgctcaatcctatgagaaagaatgaagaactcttatttgactctatagatgccatatctaacatctgtttaaccaaaatcaataataagagcacgcatattttcgtcaaacggctggcagcatacaatctgtacattaattttttatttatcagcgtttcacataccatacaagtctccttgagaatgaagattataaaaagcaaatctctgttttatcgtttttgcagtctgattcttcaactgtggcattttctgttgcaccagaagttctaatttctccatttcttcattcgttaatgattttttatcgacaaaaatgggaatcacttcgtttgtaattatcaggaaaaaataatagtgtttcaatttgtaatagttactgattgattcataccccacaatcctgctttctacataaaaatcgttaatttctacactatcgggcaaaaaatttactttaccaaattcattttccatcttatactttttgcataaacgcattgccgcaatcctgcagttatgaacaatcaaccatgtcggcgcaataaatgctgccacagccacacacatattttgtatcattagttcagtggatttcactcgaagcatacatgtaaaaagaaatagtatggcaacgacaaaaactctgtataatgccatgtagcgaaaatcctttactctataaaataattccacaaatgctctggttcgatatatgtttttcaattgtttttcctttctttctcatgaacttttacctgtggcattttctcatgaatcagggaagtcaaactatgcatatctgcttctgttaaaactgttttatcaatgatgattgtttcctgcgtcagtcccttttcgatttttcttttatccccgaagacacaataatgtttcagtatataaaaatctttaaacctactatattccatagaatactcagactccgtatttccatatgggattacttttaatgcagactcatcaaatacaatctctccccaaagttcatttgtatgtgctaagtcttctattttttccatcatcattttggtgtcatgtctcataatgaattgattttcaataataatcgcaaatataaacaagaaaaatgctgctgaaaaaactatttggtgaaaacaataaaaaacaattgacattactaaggatgtaccgataaaactatataaaatttttcgaatcatcggatttattgccatataacattcacgtaccgacttataatttataattattttaaatttcattttttctgcactccttctgtttgctgatctatcttactttggtaacttcacctatgacattttttccttacaccataaaacgctatctgtgaaacacacaggcaaaataactttcatatactactttatcatttacaatcgttgtatatctcatcttgttttcctcatgtgtcatatgctctttatcaagaaggataaacctctttcaccctaaaactattcttccagttcctcaattgctttccgaagttcctcaatctccgctttggaagccggttcatccttataaaaagcggtgataaactgcttcagcgaaccattattccagaatgcgacaaactctctcgcctgctcactcttgtagtcctcttccgtgatgagtatttcataggtgatcgttcttccggctcgtttcatttggatataatttttgatacagagttttgcaaggtatgtggataccgtctgtggtttccactcttttccgtatccctcatttgcattttttacgatctctgccagtgacatctcatggtctgcgtcccagatacacttcatcacaattgtttctgctgcggtcagttgttttgcattcattttcttttcctcctgaatcattccataactatataaactataaatttaatttgtaattacttactatatactatacgatttaattccatattgcaatctttttctgcgcatccctgcggcgcattactactttccctcaacagggtacttccattttttaggctcaaaaaggactgcacaaggcagtcctctctctgttctctctatttttctattcttcatcaattgctgcaatcgccttcagattctccaatgcttcgaatgtatgatcgacagctgttgaaaaattgcttacactgtcatgcagaccatccatatccgttctgcttgcggaagtgcttgcagaaatctcctgcgtgattcctgacaaagtagagattccgtctacgatcacttcattggcacttagaacggcagatacctcatcgcttaccgtcgtcatatctcctactaaagatttcacatcttcctcaacggttataaagctttcatgtaccgtttttaccttttcacgctgcacatcgatactgtctaccgcattcttaagttcggtctgtgtatcctttgtgatagcagtcagttcattcatgatctgtgtgatctgctccgttgataccttggtcatttctgccagctggcggatttcctctgcaacaacggcaaaaccttttccggcatctcctgctcgggcagcctcgattgaagcgttcagtgccaacaggtttgtctggctggaaatatttaaaattgcatctgtgattccggatacttttccaacatgttccaccagtttctcaatggtctgggaaatctgctctgtggactgatctacgatcacggactgtcttgccagttcatccgactcattcttgccagtttcaatgaccccccgcagcttctccgttgtctccaaagctcctgctgccgtctgattggtgtgctctaaacgctcctggatctcatttgttttttctgactgcgtctgtgtctgtgttgctgaactgtcagcgccatttgcaatgattccgattgcgatctgcgtattgtcgatcgtgctggatatctgggataaatcttttctgacctgcgtaaactgcgcatccacatcgtttacgatagtctcaacttcttttgctacctgtaactgcttctctgcttttacttttactgcgtccgtctcctcattggaaaactcgatcagacgcctgatcgccttacatccgccaaacacacacatgatcaggcagatacatacgagaaaaaccgtattcaactgttctgccttgtccgccggattatttacaaggatctgggccatcttggtaataataaatactaaggttgcacccgctccccacatgatcagaaattcgttcaaatatacagacaatgaaagcaaaaccgggaaaatcagcatcataactgttgggttctgtaaataagaaataattccaaatccgatacaaaatccaactgctataaacagttccgcttttctttcataaatattctttgccacaaaaatggctgtcagcgcataccagatcacataaaatgaaacaaatattattttctcaagcgttgtccgatccgatgtgagcatgatcaaaatataaaaaacatatgccattgtaacggtaagacacgtcgtgatattggcacgtttcatttgatccggtggtaaatcttttctggtaaatttcatattcctatgcccctttacataaaaaatagcagctctgtaatcaaatattttcatttttattacaatgcacaaatctatctctatgataatacttcattcgacaaacgtaaacatttttttcgaaatagggaacaaaaaattttcgttattttttatccgacagcacaaaaagaactgctgcatatttctatgcgcagtccttttttattaagaaatgaatattcaaaatggccggttattattttactgcatcaaacgcttcctgcagatcgtagagaatatcatcaatgttctctgtaccgattgagagacggatggtgtttggcttgattccctgctctgcctgttccgcctcatttaattccgcatgtgtggtagatgccggatggatgacaagggattttacatctgctacattggcaagtaaggagaataactgtaaatgatcgataaactcctgcgcttttttgtcatcgcctttgatttcaaatgtgaaaatggaaccgccgccgttcgggaaatattttttgtataatctctgctgctccggatcttcggaaacggatggatgatttactttttcaaccagtggctgtttctctaaaaattccacaacctttaatgcattttccacatgacgctcaactcttaaagataatgtctctaagccctgtaaaaagataaatgcatggattggagaaagtgttgccccggtatcccttaataaaatagcacggattcttgtcacgaatgctgccggccctgctgccgctgcgaagctgacaccatgatagcttgggtttggttccgtgagctgtgggaattttccggatgcagcccagtcaaattttccaccgtcaatgatgacaccaccgattgtggttccatgtccaccaatgaatttggttgcggaatgaaccacgatatctgcgccgtactcgattggacggatcagatatggcgtgccgaacgtattgtcgatgacaagtggaattttatgcttgtgtgcgatctctgcgagtgcttcgatatccactacttcagagtttggattgccgagtgtctcaatgtaaactgcttttgtgttgtccttgatagcgccttctacttcctctaagttaaaaggatcaacaaaagtagtcgtaacgccaaaatctactaatgtatgtgccagcaaattataagtgccgccgtaaatattttttgcagatacgatatgatcacctgcctgtgcaaggttttcaatcgtgtatgtaacggctgctgcaccggaaccgactgcaagcgctgccacgccgccctctaatgctgcaatacgctgttcaaaaatatcctctgtcggattggtcagtcttccgtaaatatttcctgcgtcacgcaaaccgaaacggtctgctgcatgctttgaattgtggaatacgtaggaagatgtctggtaaatcggaaccgctcttgcatcggtcaccggatccggttcttcctgtccaacgtgtaactgtaatgtctcaaattttaattttctctcttttaatgtgctcatgtgttttcccatcctttttctatgttttcattccttttgcctgcctgtttttctcaggttctgctgttggaattatcatatcaaatcaatcgaaaaagtgttaatccataaaaccatgagccgattatagggaaatcctatagcagtattattccctgtcctgttttttcctgcactccctgcaaagtccataaataatggaatttttacactgcagtttaaatccgtggtcttctaaaatatgttccgatatttcctgcataaacgcacattccaaatgaataatacagccacaggaaacacattttaaatgaagatgttcctcacagtgatgtcccatctccacgtactgatacaccgcctggctccccttctctgccacatatttcatgacagttccctctttggcaagtttatccaggtaacggtaaatcgttgtgatgttcacctcgttatcgtgttttttcaaatactggtcaatgtccgtcaccgtcactgtgcggtcgctgtttgccatgagatattctaaaattttctttctgctggtcgttgcataaccatttcctgccattttttcatctcttttctttctctgtatatgctttcactgtagcagatacaatttttaactctttcctcttaatttcatacttccgcgtatcaattattcatctacatctgttaaaatacaatcccaagtaactcaatgatcacgccccagacaacaccaaagccatagagtgctgccataattccggcattctgtttccagtcccggttcagtcggaacaaaaccaaaagtccaactcctgcatttaccaaaagtccggacatcattgctcctgctccgataattccgcttaaatataactctgtgattaccaccgaagatgcgcagtttgggatcagtcccacaaatgctgcgatcatctctcccaccaccggaatgtcctgaaataccaccgcaagctggtcttcgccgatcagttcgatcacgaatgtcagcataaacgtgatgagcagaatgtatgcaaaaatcttgaacgtgtgttttagcgccgacttcaagacaccgtcctcacaactgcaatgttcttcctcacagaccacatgaatatccatgtctttttctttctttttgaaaacattcacataaaccagctctgcaagaaatcctgaaataatcgcaatgcagacttttgctgcaagaatttttacgattgttgccggtgcgaccgcctcggaaataaaaatcggaagcatctcatccgacgtagataaaaataccgcaagtagcgttccaaccgtaatgactcgtccggcataaaggctggacgctgctgctgaaaaaccacattgcggcataatcccaagcaaaccgccccacagcggtccgactttccctgcatttttgattttgttctgcacttttccgcctgtcgtgtgctctaacaattccattaataaataagtgaaaaacagaaatggaagcagcttcacgctgtcttcgatcgtgtgtgataatgtatgttctaaaatgtgtaacataacaaacgcctcctgcatttggttgtttcaatcttaatttttcaaattgcaatcaatttgtttttgcattttgtatgcatttgcaaattgtttgcgttttgactgcattggttattatacacacttagttggagatgtcaagaggaaaattcctctgaatcttttccattttcaagaaacgcagtatcatttataatctcatttacatcacagtttcttttattcttttctttaactgatttttataaaccaatagaattaagatctacatgataagattcataattttttccactataatataccctgacattttctccctgataatctctttgaggttccccccactgccctctggatgcaaaaatatgtattttcccatccggtgcatcatatcggcataacactgtataccccacaaatgctctgtttttttcatcaaccggaactttaaactgctcacttaaactatccgtaactttcaaaaacattggctttacaatactgttaacctttattcttcccacaagttccaccccacaggttaccgcatttatataatttccttctttcagtaaagcacgttcttttcctctactatcaaacttaaacttatgtaaaactgccgaatccggcaaaatagaacttgtatctacataatacttctttggatttttcaaatcgacataaacctttaattgcttctctttaattaaagccgatggattatataaaagtgacttgcttttaaacagatattcttttccatttgcttccacatatttacatacaataaaatagggattcattgaaatacggtctatctgtactttctgatatacatttacatcaatatcgacaatatctgcgtaaatatattttccatttgcaattaatttttctttttttccttttttcgtagtataaattatcatgcaaattattccaacgattaaaaaaactgccagaacgctgccaaagataattgaaaacaaccacaaagatgggactatgaaacacaaaatcagactacctgaaacacccaaagttcctatacataaaaatataatactcagcttttttaataagcttgcaccgttttccatgatgttgttattccttttcctttatttttcttttttcaaattaaagaacaaacctaatactccaaataacataataccaattggtattgcaatgggaacaacaatatcaatcaagtttatctctctgctatttataaaattgtacggattatcagggttaacccaaagtgttatttttgtaccttctggcactggatctgacttttcatccgttactgtcaatgtaattttttcattatcaacagtatattcaccaatttgtctatacctgcgtacagactctccatcccctgtagttgtccaataaggctcattctatataacaaccgcctcaacttctaaagtacatacttctgcattatgtgtcattgccggaagaaccacaaataatacaaatagtaacatccctatcccaattattaaaaaaacaagactgacaattacattttttatattgataccctttttcattccatctctttcactttctattttattattcataaaacactaatttctcatttgcaaattcgatttgagtttcatcttacctgcacgcaattgctatttttcattatttgccttttaaacttatccttacttttccacctattaccgcatcatcatactgctcttgtgttaaataatagatactctcatacccaattgttgtatctcttccaacaatcggataaacaatggacagatctgatcctgatgtcaacgttccatccacatgtctctcctccggtaaaattttcacaacttccgcctcaatataatatgctctcttggctgctttaatacttgtcttgtccccagactcacatataatagttataaaaaaataaaataacaatgcaatgtctataacacatctgattttccaagccaaacaccttattaacacgagcaccattaatatgattaaaaaaacacatctccttttttttctttttttcaaaaattgttctgaattacattttatttcttcatccgtatatttttttactgtaaaattctctctgtcactatcggtaaactgaatcgctcctccatttataaccataatactatctaaatctccagattctaaatttgcattattaacattcttttttgtgccattacgaagccttcacctgaaacaaagggtcttcctcgatcaattcaataaatgcttctgcgacatccggatcaaactgcgtgccttttcctttttctaattccccgatcgcatactccacgctcagtggatccttgtaggctctttttgacaccattgcatcaaagctgtcacacactgcaaggatcctgcctaaaagtgggatgtccgttcctttgacaccgcccgggtaaccttttccgtcatagcgttcatggtgggataagaccgccggaatgacatagttcatattcgggagaaaatggatcatctcaatggaattttccacatgcgttttcatgacctcgtattcctcatctgtgagcttgccctttttctttaaaatgctttccggaattccgatttttccgatatcatgaagcagtcctgcgacttttgcagtctggatatcatcctttggaagccccatttttgctgcaagcttcatcgcatattctgaaacatgctcagaatgttcaaaggtaaacgaatccttggcatcgactgctgccattaatgcaaaaatcgtcggtgttacctgctcataacctttctccctgctctgttcctgctcttcaaaactcttttcgtaaatctcaatgcggtttttaccatttccttttgcatagaaggctgcccgtcttgcctgacggaataattttcttgcactttctgccatgtttttgtcccatgcgattccaatgctgaacgtaatcggctggatgacttttggtttatcttctttctgttctaatatcgtattctgtatcagcctcgcaaacgacaatagtatttcttttctgctttcttccgcaataataagaaattcattggaaccgacacggaataccgacattttgtcactgcagaggttctgcacctgggatgcgctccacttcaggatctggtctccggtctcctcgccgtacagatcattgtataacttaaagttatccatatccagatatatcattcctatcggatgttcctttatgtccagatttttcataaattcactgcaatagctacggttatacagacctgtcagttcatcatgaatggacacctgatatactttttcataggcactgatattttttaatgcaccggatacgctgtttgcgatctgccggatacagtccgcctcatcatagatcagcctgttttttctgtgaagctccacatataaaaatccataaattttatcgtcatacttaaaaactgcgatctccggttttttatgaatgccgccggtgccgcagaatgacctcagccttgcctcctcctctgtgtccagcacccggtctccgtctgccgtacactccacaaaatggccatctcttttttcaaaaatacgtgcataagagtccggtactgccgaactgacggtgcttcggattctctggtacagttcttttttattcaggattgaggccgccatatcctgaaattccacaaggctctccacaatgtgttttttcttctggtacaggatacgctccagccattttctggcatagctcatgacgagcaccatccagaggcactgcagaacgacaaacactgtgataaactgtctggtaaagctgtccgtctgaccaatcacatggtcaatgtttggctccaaaataatcattggaagaaacgctacaactactgcgatcaaatatacggcacctgttgtcgcacgcatggaaaatgagaacagatactgtttataaataatgtatacaaaacagaccgccattcccactccgccaagggtatcgaatgggaaatcaccgctccatggcatcacgcacagaatatttccacccatgatgagcagtgttcctattaataatgggccgagttttttccggtactctaattgtcccccgatttttttatgggcaagcagcgttacatacactaacagaattatctctgctgctgccagcaaccagatgcctgtttttgcatgataatggtaggatataccgccattcgccatgatctgcacttccggcggtgggagaatacaaccggtaaaaacattcagcaggacaactgacaccgtcacagccatacagccatccagaaatctgtcctttccccggatatcaagataatggaacaaaaatccatatatcagtatcgggatcgtaaaaagtcccatcagtgatacatgataccagaactgtatccccgggctgatctgcagtctcatgagcacagcgccgcctgtccaggacaataatgccgacagtattgccttgagatctcttacttctgatgatttctctgcaacattcagaaaacagaatagtaaaaacagatagcatatgagtgcagccattggaatgccaatatatatatttttgagcaacaccaaattcatgaaacgctccatttttccttctccttcgtaagttccagcataagcataagcacactccatttccggttcgttggtgtaaggactgctttatagtcaaccgggatctgtttccggcgcagttcaaacagtattttgtcaaaatgcttttccctcacaccgcagaataccataaggctttcctgtggcgcactgccggtaaacggtgctgtgagaacattcttttttccatctgcaagatccccgatactctgccgcaaatctacagctttgatctcctccagacggattttcattggcgcaagcagctgttttatcgtttctttttcttttacctgatagatcaatattttttccatgtttttctctccagacctaagaaaagccaaacacaaaatatgtctggctttttctttcattctatcattttttataacacttcttcaacaatttttttcaaagtgccggcagaacttttcagtttgtctgtttcctcttcatcgagagcgatcggaatctggttttccacaccgtgcgctcccacgattgccggcatgcttaaggaaatatcggaaatcccgaattctccgtgcatcagattcgataccggtaaaatggatttttcgtcgcggatgattgcctcacagattctacgcactgccattgcaactccaaaataggtcgcctttttctttgcaatgatctcgtaagcactgttttttacattctctgcaatacgctcggtcgcttcgtcatggttgaagtgtccgcgcatctcgcagaatgtattgatcggcacacctgaaacagttgcgctgctccatgctgcaagctcgctgtctccgtgttcgccgataatgaatgcgtgcacactccggctgtccacattcaaatgctctccgaggttgtattttaatcttgcagtgtctagcaccgttccggagccaagcacccggttttccgggaaaccagacaatttcaatgccgtgtaggtcaggatatccaccggattggaaacgatcaacaggattcctccgcagtttctttttgcaatttccggaatgatggatttgaaaataccgacatttttctggacaaggtctaatcttgtctcatccggtttctgattggcgcctgctgtcacgatgatgatcgctgcatccacgatatcatcataatctccggcatagattttcattggtcttgcaaaaggaagtccatggctgatgtccagcgcctctccctctgccctgtttttatcagcatcgatcagaaccatctcggaaaacagaccgctttccattaatgcaaatgctgttgcagatcctacaaaaccgcatccgatcattgcaacttttctctgatttacgcttgtttcactcatattttcgtcctctctttcttttttccaaaatatctcctgtaagtggagacaacttcagaattttactgttattccaggattcttccatccgtagaaatggtcaccacctgccatggaatgaattttccactgttctgcagtgcttttttcgcagccatttcgattccgccacagcaaggcacttccatacgtgttattgtaacagatttgatgtcgttgtttttgataatttctgtcaacttttcagaatagtccacatcatctaactttggacatccaatcagtgttacatgattcctgatgaatctgcggtggaaatcgccatacgcataagcgctgcagtctgccgcgatcagtaagttcgctccgtcaaaatatggggcgcgtaccggagcaagtttaatctgaaccggccactgtgtcagttcggagcggatctctccggctgttgctgcgcctgtgttcatgcctgaatctgcttcctctctgtggattgctcttgcacggctgcccggacatccgcaaggagatgctgtgctctgtttctctgcttcttttcttttcttgttttcttttactgcctgttcgtcgtaagctgctgcctcacgctccacaaaatggatcgcatctaccggacaggccgggagacagtcgccgagaccgtcacaataatcatcgcgcataagcttcgcttttccattcaccattgcgattgctccctcatgacatgcctctgcacaaagaccgcatcctacacatgcttcctcattgatctctataatttttcttaccataattcgttcctcctgtttttctctctgtgatttttctgctgcaatttgcagaatacgttactgttcacttgcacctcgttccagcaacgattcacagactctttttaagtttggttggttatattgactttctgtggatatattaatataatacagaaaagatttctgttgtttttacaacgtaatttgcgagagttgcatcataacggagcaatttgtgtatcaaatgaagatcaaataccatttaactttacagttatgatttgaaaaggagtttccatgctagacaacgacttacttttattacaaaaatctgtatttaccggtatcacaacggacgagatcaacgccatgctctcctgcctgtcggcgagagaagcagctttccagaaggatgagattattttttcctacgggcagaacatcacaagcattggcattgtgttagaaggaaatgtgcacattattaaggaagatttctggggaaatgccaatcttatggctgaatgttcgccgggtgatattttcggggaagcctacgcgatcaacgctgctgaaccattggaaatgaatatttttgctgcctctgcctgccgcattttatttctcgaagtttccaagattttaacagtctgttcctctgcctgtgaatttcacaaccggctgatccgcaatctgttaacgctggtatcccgcaagaattttcagctaaaccgcaagttagagcacatgtcaaaacgtacgaccagggacaagctgctctcttacctgtctatggaatccaaaaaagcaaacgcctcctcctttacgattccattcaaccgccagcagctcgccgactatctctctgtcgaccgctctgcaatgtcgaatgaattatgtaaactaagagacgaggggattctaacgttcaacaaaaattccttcacgcttacagactgggactaaacgaaaagagctgccaagcagctcttttcctctgatgtatatacacttccgcctgtttaaattcccttctccttgagataatcaacccagatgtcgtacttcgaaccgtaaaggtgaacgtcatcgaaagtcagattgcttttcagattgccgtcctcgtcacacaccacctcattcatgtcaaggtaaaaaatattttttccgtctgcgagtgcagcgatccgctcattccgctgctcgatccccacattgttaaagattggatctttatcacttttttcttttgcaaccttcatgatcccctgaacgaagatcacagcatccggctggagttcccggaattttttcacggactcctcgtaggctgtcatgaagccgtccagcgttccccttcccatttcgttaatgccgatctggaaatagattttgccatactgttttgcttttaaggcttcttcgagtgtgaccttctctccgtctacttcacagaacttttcagtccagagattgtagatattcatgccgacggtcgcatagaaagtactgtcattaagtccgccgtaatcgtgaagtccgacggttcttgaatcaccgatgaataccgcatctgaaaaataggaatcatccaccggatgaaaggattttacctcctctgtctctgtgacggtctcggtttccaccacattttcagttccttctgccacgatctcactgctctccgtcccaagaatctgttcttcatcttttcgctgctccgcgagtttttcccatttatcccataaagattcgtgctcgccgctccacggatacacgccgtcatggattccctgcatgacaagcacaaagtatggtgtttttttcacatctatcgtgtaacggctgtaaaccgtatcttttcctagaaatcctatcgccgacaggatcacccagccagctaaaatcagaatggtgattttgcagtatctgatttttttcatttctgctccttcctagaaattaaagtataaaaacggattgtttgctgataccgcaaggtagtacatgctgagtgcaaagatcaccgcaattgcaagcgtaccaagcagtccccgctttattcttccataaatgaccgccggaagcggagttgcaaaaagaactcccattgctaacagactgtcatagtctctgatatatttgacataatcgagcggattaaccgttcctgtgtgcattttcacaaacggaaacatccgcatcagatagattccaagctggtgcacatctgtgatcgtaaaagccatccatgtcacaggcacaacgagaagcagatacacatgacttaaaactctgcttttctgtaaaaaaggaagcagaaacaatttttccacaaataaaagtccaagcagcatgccgccccagatcagaaaattatacccggctccgtgccacagtgcagtcagcgcccataccacaaaaaggttgaacattgttctggctttgcctttcctattaccgcccagcggaatgtatacataatcacggaaccaccgtcccagcgtgatgtgccagcgccgccaaaactccgtcaccgatttcgaaatgtatgggaaacggaagttcaccggaatctggaatccgagcatttttccgagaccgattgccatcatggaataccctgcaaagtcaaagtacagttccatggaataagcgatcgccccaagccatgctaacggcgttgaaatgctgttaaatccaatcgtctgcacgttgttccacagcatgccgatccggtctgcgataatgactttggaaccaagcccgataattaaaatccgcacaccgtcctcaaaatcacggactgtcacagtacggctttttaaccggctgctcacctctgtatagttgacgattggtccggcgatcaactgcggaaacatcgtcagataagttccgaggtttacataagatttttccgccggtacaacgccacgatacacatcaatgacatacgctgcaatctggaatgtataaaagctgataccaagtggcagcttcgtagtcagaccgctgtatttgaagaaaaagagcatgccaaaatcatagcacagcgcgagcacgagcagtaccgcctgccgtcttcctctcccgctctcccttttccggtacatgttccgcgcgatcacatagtttaccgtgacagacgccagcagtaacagcacatactgcgcctctccataggtatagaacacaaggctcccaaaaaagagtaccgcgttgcggaacttctttggtgtcacaaaatataagattaaaaaagccggtaaaaaccggaataaaaattcaaaactgctaaataccatacgtggtttcttctcacattctaatctgtactaaaacaattttcatgtacaaaaaaataactgcctgcatcttaacagacagttgttattatagatgaaaaaaataaagatttccatagcattaattttaaaattatattaaatagctgggattttgtaacttttctgtaatgattttatctcccctataaaatataaagaaccgaatgcgactgttttttctgatgatgattttgaaaaatccggcagcacctcggcaagactctgatatgcctctgccgggattccttttgcccggatacattccgcaagcgcctccccctgtaaagcccgctcgctctccaccgtcacagtcttaaaatcaatcgcaagcggcagcagttcttcaatcatctcctcataatctttgtctgccataacacccatgataaaatgaaacttctcgcccggatataatgtctctaaactttttttcaaagcctccacgccgttgctgttatgcgcaccgtccaacaggaaaaacggatcacggctcacaagctccatgcgtcccatccacgttgtttttccgattccagaacggatagcactctctattatttttccggtatctgctattttttccagaaaaagctctacggcaagcattgctgccactgcattttcatactggtgcacaccgagcatctgcatggtgaatggtccggcttctccataggaaaagcactgttttccgtcggtctgcggtaaaattttgattttatcccagtctacgatttttacattttctatccctgctttttgagctgcgcctgttaacacgtccatggcttctttttcctggctttctaacaccagtgctgtgccatgcttgatgatacctgctttttccgatgcgatcttacctaacgtatcaccgaggatcgccatgtggtcgaacccgatttttgcaatgactgtcacatccggtatgccgcacgcatttgtggaatcataggttccgccaagcccggtttctaagatcacgacctcacactgctgctctttgaaataaagcagtgccattgccaggcaatagtcaaacatcgtcggatacaccccaaaatccatggaaagcagcttatttccaaggcgggcggtgtcctcttttgagatcatttttccctgcacctgaatccgttccctgaaatccacaagatgcggtgatgtaaacattccggtttttaaccctgcttcttctaaaatcgagcgcaaaaaagcagagacggagcctttgccattcgtccctgctatgtgtatgatgtgtaaatccttctccgggtgtcctagtttttctaacatgattctggaaatctcgacaccctttaagtttccaaatctttttttattttcaatggttgttactgtttcttcgtaagttaatctctgcatctgactatactgccatgatcacgccgccgtcattcgcatacatgctgctgacacctgctgtattgataataatgatctttttgaatttcgcgatcttctcgattttttccttcactgcttttgcacgctccgggcagttgcagtgtgcgattgcaaggacacggttctcacagtcttttgtctttgagatcatatcctttaccatgcgctctaacgctttattcatgccgcgcgcctgatctaactggcagattaagccctcctttgttgagcccataacaggcttgatatttaatgaattggcaataaatgcctttaaattggaaagtcttccgttctttctcaatgtttctaatgtctctaatacaaaataggtgttcatcgacttgatgtactcttccaccttcgctacgacttcgtcaaagctgcatccggcttcctcgaactcctgaatcttcattccaatgatcgtctcaccaatggaagctgatttcgaattgaacacataaatctgttttccgtcctcatgttcttcctcatacagattctttcccaatacagcactgttataagaaccgcttaagccgccggataaggttaccacatagacatgatctgcctctccctcatatgcgttcatatactgctctggtgacgggcaggaagattttggtccggtcagactttctttcactctgcgcaaaaaatctaactggttaaaagtattatcatccttaatgcggcatccgtctacttctaattccagagaaacggtctcaaaatgactatcctgttttaattcttccggtaattctccacaactgtcaattacaatcttatacataatatcctccttttttccgtaggaaaatctatttaaagttttattttctattacatgtagtttttgttactatgtaacattaacacaaaaactttgttttgtatagaggatattttatttttttaaattagtaactattcagcaccacattcgcaaaatcgctctttcagagctttccttttgctcatatggttactaaaattttatcgttaacacattctggtcggaatcttccagataatataaagaggtcagtccatgacaataatgcacgattttctgctccgtaatcaaataggaaaaagcctgttcatacagctccctgctggcaaatttaactgagcagaatccttttccctgctcataggctgttttatatacctcgccaaccgcatctgcgtcccagctatcaaaatacagattttcatgcacataataattatccctgaccgcctgacagactgggatgatgatatcatcattcggctgatgcgtcttttgcagttcctccgtcgtcaccgcaaaataattataattgacaaaagaatccagacctatattttcaccgctgtaggtggcatttccccaggttgtatcgatgtagtagtactctccgtctaattttaccagattccacgcgtgtgactgaccgtttgccgtgcctgtcaccactgctgccgggatattcagtttttccaacagatactgcgttgctgtcgcatagccctgacaaacggtttccccattcacaaatacactgatgatgttctggttatccggtgcacctgtgctgtaggcaacattggacgcgagatagtcaaacacatattttgccttatcataatcggaagcggaaacatcgattcctgccagaatctggttcactgctgcatcaatttcagcctgtgtattcacctgttcttcttctgtcatggtaaactttggagtaaaatgaaggtctaccagcttctcccctctagtatactgcgtataagtataaccggacacccagaacagtcctccgtggtctgccattaccgatacatacgcctgattcaatatttcctgttccaacgtactgaccgcgacatcttccttatgatgcaggattgcatcataaacctcgtcatagaccgtgcggacattctccggaagcgtctgatagacataacagtctgcggacagcatttcagcatccggctctgtggcgttttctgttgtctctgccgtttcttctgtttccgtggaaacaatctgtgaatcttcctgtgcggtattttcttctatgccattcgctccgctgatgattccttctgagattttttcctgcgcataccgggcaagctccgataaattaccgtctcccggctcacatcccgaaagcaggatgagcgctgcacatgccacgcttcctgcaataaaggtaaaattctttcttttcacctgtttctcctgttttgttacattttcacaacgttcataacataaattagagtttcacaaaggcgctttagcaaaaataagctttcactaagtcttttaacgcctgctggtctgacgctgccatcagctctcttgcagaatgcatggcaagcagcgggataccaatatccactgtttttaccggcaaaagtgcggatgcgatcgaacctaatgtaccgcctcctgctatgtcagaacggtttacaaacttctgatatgggatctggtttttctcacagatctgctggatcactgcaaccgcactgcagtctgtcgcatacgactgggagcatgcctccttgatacagaagcctttgccgagtaccggtttgtttgtcagatccatttttccggcataattcggatgaagtccatgtgccacatccacagataagatcatgctgttgtataatctgctgcacgcttctttttcctgtcctgcctcccgcaaaatccgctcaagcatatcgtgaagcagaatagaacctgctccctgcttcgagcggcttccgatttcctcatggtcaaacagtgcgatcaggttcatgccatttgtccggtcactgtcaatgatagcagacactaacgcagagcaggaatttaagttatctaatcttgacgcagagataaactcgtcatttaaaccgacaaattccggtttttccttattatatacggtcagttcaaaatcaaggatatcctctttttttaccgaaagttcctttgcaaggaacgtgaggaaataatctgcatcctccgaaagtccgcagattgggagcagctctgtctgtctgtttaattccacacctttattcacttcgcggttcatgtggattgcaagattcgggatcgtcataagatttttttccgattgaaaatgaaccacttccggcgtaaacacatcttctccgcgcactgccactcttccggctacgcctagcggacgatccagccatgtatttaagatcgcgccgccataaacttccacgttcacctgtgcatatccgttggtcttaatatcacaggaaggtttgattctcaagcacggaaaatccgtatgtgctgctgcaatacggatcgtaggctctttatctccccatttttccggcagggtaaaagcaaataaggttgtctcatgatgatttaccacatattttcccccggctttcagattccattccttcccataatcaatcgtttcaaagccggcgtctgtcagccttttctcgcatgcactcactgcatgtgccggtgaaattcctttttctaataaatcgaataaaatttctgtctctgtcatattcgttaccatacctttccattttccgcggacattttactccgcagccacaaatcctctacattctagcatagtttctctttttttcctataggcggcagttatttctttacaagacttccggtgaatgataaattgtatctatatgctgtaatgtactctcgaaatcttctaaaggaagaattgcgatagtttttactgattgggagggttttatgatcgcattaaaaatgatagaagtgaaagactttatgaataaattgctgtgtcagaatgtgtttgaccattttctgcttcaggaagctgccattcacacgaatgtcgcctaccatattgatggtgccctgcaaaaagatttttattgcgaggaggaattagaagccggtcagcttaccgggctttcctttgcgccatacggacttttgcgcagtcagtgttttaacctgatcaaaggaaaaaaaacaccttcctattttaaattttccctgctcttatccccggaaaatttaaaacggacgctctcccagaccggaagttctttcaccgaaaatgatatttctgcggtatttttgaatatccgcttccagaatggagaactgaccgttaccaccggaatctcttaccggattttctctgtcgacaaaacgttagagcatgagtgggacgccctgctgaaacgttttctgacaaaaaatgagattgcatttgaagaattgtaggcggcatctctccgcctacaatgtgactgtaaataaaatggattttcccttttctatctgatccgtcgtgttccacaccgttatgattttgtttttgccggagttttttaatgtaatgcagatcgttccgtgctctgaggaatatttcatggcgttgtctaaaagcagggagatcatctgtctgatgtttttctcatcccccacataatcaatctgctttcttgtgcttttcgtccactcgttctcaccctccgtcatctcaagcacttcggtgttcgcgtcaatgatcgtaagcggtgttttgatctcgtggcttgcatccgtgatgaaacgtttctgtttttcgtaactttctgacaccggttttaacacttttccggagaaaaagtagatcatgataaataccacgatcaacccgagtgctccgattcctgcactgtaaaatatctcgtatcaaaagggctttcctccgaaatgccatgtttttgtaattcattcataagcggagggttttgtggactgctgcccggttgactgttcttctgcagcatctttcaacgtcacatggtaagtcagtttataaaggcttcccatattcgaagtttttacggaaaccacttcacaggatgataaatatttttcaaaaagatcctcgaaaacagttccgtaatttaaatcttccgggattgtgatacgcagtgtcttctcttttatttccgctttttttacggcaaaaccgctcacgttcaacacgaacatgaccactcccataatcagggaaaacagtaccgaaaatccggtacggaaatcacggtcgttgctgctgaatcaaaaagtcctgtaaataaattgtttaacataatattctctccatttctcattaacatttcactgcctgctgcatcacttcatttcctgtaaaaataaagagttctttcggctgacagcttcttaggcttctttcataagtcgcgcggtatgctgtggcatatttggaaaatgatgttttgtaaatctgattttctgtcagtaatcaatctctctggtgatctgcgtatcctttactttttcatgagctgacagatagtgttccgcctctgcctcggacatggcaattcttcttttgtatacaacagattcgtatttcttttttaattctacaaaaacggtcgtatccttatctgccgttccataacttctcagtcttaatttttctttataaaccggatgttccatggatcttcggatcagcagatgatccggtgtatcaaagtacagactgcatatggtactcacgccatgttcatctgcaaccatatactggtccataagtttttttaacagttctgcctgtgtgacatccaacatgtatttgatctcacatcttttaaatatcatctggtctgccatcggtttctcctttcctttgagcacatcttaacaggcgaaccttaaatgaacttaaaaatatttttatgtacgcaaaaaagagtgtcggtaaaaccgacactctttttcaaatccattgtttgcaatatcttaatctagaaaaataaaacaagttctatttaataaagaaaaaggtacatgaaactactgatttagactgtagtaacaagcgataatctgattatcttactactgttacgtttgttgcctgtggtccttttgcgccttcaacaacttcaaattctactgctgcgccttcttctaaggatttgaatccttccatgttaagacctgagtagtgaacgaatacgtcatttccctgctcatcagagatgaatccgtatcctttttggttgttaaaccactttactgtacctttgttcattgaaaagtacctccaaaaaatatttctatggtgcacttatcacaccataatcacagaataacataacagtttcaaaaagtaaagcgataaaatcaaagttcattgggatatttttcaattactttttcctgactgctgcggtctggctaagctttccacttacattccaagcttcactttaatgatccttgcaacggattcattgatgcggtcttcggtgatcgttccacttgtcactgcatcaatcacaccctgataggcgctctggaaatcctccggcattaagatcatatccacacctgcctgtatcgctgcgacagccgcatccgacgaactataggttcctgtaatggcacccatattcatcgcatccgtgatcacaacaccatgaaaacctaactggtttcgaagtacatctgtcaccataacagaggaaagagacgctggtgtatcatctcctgtaaccgcaggagcagaaatatgtcctaccatgacaaaagatgctccgttattgactgcctgctggaatggaacaagttcattcgcgagaaggtcatctaatgatttgtcagtagaaactgttccctcatgggaatctcctgctgtcgcaccatgtcccgggaaatgtttcactacgcttaatatctggtgttcgttcagcccctgcatctcggcacaaaccatatctgccacaaactggctgtctgaaccgaaagacctgtctttcattactgtattatccggattcgaaagtacatctgcaaccggtgcaaaatccatattaaaaccaagtgtgttcagatatgttccgatcgtacttcctgcattgtaagcattctgggaatctcccgttgccccgacatcactcatatttccaacatctgtcacaccaaaagcactgttagaggcgattcttgcaacggttccgccttcctcatccacaccaaggaaaaccggaagtccggtaatctcctgactatagtttttcatatttgtaagcatctgtgtcgtctgatccgttcctgtcagattctttgacatatagataagtccaccaaccggatactgtgtgtatgctgctttcgtggaatctcctgccatagtagctccgtctgctcccgttaaagcatctggcgtgatcataaacatctgcgctactttctgttctaacgtcattccagctgcaatctgcattgcctgatccataagcggatcactgacttccgtcacaggagttgtttccggttcttctgtcgcctcggttatcacgctctcggtattcttttccggtttatctgcgcccggttttacaaatttatggactgcaaacacaattcctccgatcaaaactgcaagtactataaaaaatactgccacaactatgaccgcactctgtgtatctttttttcgtttctctcgtctctcttcctgattcatctgtgtatttccttccgtgaaaaatgttctttctgcgctgttacaccattgctggttctttctttctaataatcatctcgacttcagcaacgcttgtttcagctacatctgcaatctgatttaatgtataaccttttttatacatattcagaataaacttttcagtaactcttttagtagtcctttcagtagcttttatagtggctctttcagcagctttttcttcaattcctgtactcagattacacataattctcacatcctctctgaactcctgactgattgggatattatactcatgctctattatatccaatttttcctgttctttcaactcgcttgaaagcaatgctccaatcagacgatgcatctcatagttctcctcatgttctggaatatcgtttgtgattcctattgtgatgataccagtctgctcacataaaagattgcccgatttaagattttatattttgttggctcatctttttgcgcctcaatattcacaagaatctgtgaaagtccatttctcatgcggacataaaatataatatcaaatctgactaatccttcattgatctcggaattttccgtattaagtcctacaatacgctatcctgtcacatctgttctttctacattggtcagtcccggttctactggtacaattccaataattggctctccctcaatgtattttacaacatcttccggtttcatgtccttaaattcatctactgtttttacaagaatatgagctaagatatgcttctgtgccaatattctcttaacacgggtatcatactgtaccttatctcttgctgcactcacagcgtttgttatttctgtattcaaaatcggcattcctccttttgtgtttatgcacatggcactttcaagattccacaaaagtctctctgcctcaatctcattataattgaggaaccatgcggaatcaacttaattttctgtaatcacttcatcatcaatcaagtgaatggtattctgtctgcattggtttgtttttgctgaatgttacacggatttcgtgtatgatagctgaattttgcattttgtttttaacacaatgataaaaaagatatggttattgttccgaagccatttggaagtataaaatgatctccttttttcaccggctggccattgatgattccatcaccttcggtaacagtcatgttcataaatggtgcttcctgctcaaaagtcattttaccgcaaacctcaattttataaatatgataatatttgcaggcataaagttcatttaacgtattgaccggaagatctgctgcggatttcacactgtctgaaacggattttgcaggtactgtgatcacgtcgatactcttgtcaatatgtaattctctcggttttccgtttgagagacggtcataatcgtaaacacggtaagtaatatcactgttctgctgcgtctctaaaatcaaagttccacccttgatcgcatgtatggttcccggatcgatctgaagaaaatcaccctttttgattgggatttcacggataaactcgctccattttccctcatggatcatcttgcttaattcctcttttgtctttgcattgtgtccgatgacgatcgttgcattttccttacagtccaaaatgtaccagcactctgtttttccaagagaaccattttcatggacttttgcataatcgtcgtccggatgtacctgaatgctcaggtcatcttttgcgtcaataattttgatcaggagtgggaaacggtcactgtccacatttccgaaaacttccggatgttttttccacaattcggacagcttcattccacggaatccacagtctcttaaagttccgtctccatttggatgtgcagaaattccccaacactcccctaaatcatcaccttcgaccggataatgaaaatcctctctcaatctcgtaccgccccaaatgttatgcgtacataccggatctaaaaataaaatttctttcgtggtctgattcattgataaattacctccatttgtcccgatcacatcctgataccaaaacgcagaatcttttacaattctccgctgtgtcataaaatccacataaatcatgccaaaacgttccctgtatccctcggaccattcaaaattatccagaaatgtccacaggaaatacccccggatatcggctccctcatcatatgccctctgcatggctccgatgtaggaatccagaaatgtgatgcggtcattgtcatgcactctgccgtcaaagctcacattgtcatggcaggacataccattttctgtaatatataatggaagcggataccgctccgtcaaaaatttaattccataataaaatgcttttggtgtcaccggccagttgcacgccgtctttgggaatcccggttcccggtccacaaattccggttcaccgtctgcgccctgacgcacgtaataaccattatatatgttctgtcccataaagtccagtggctgatggatcagctgcatatctgactctgtgatttccggcagatactctttgaacttttccagtccctcttttggataatgacctaaaaagaccggatctgaaaaccatgagatattccaggtccagttatccatcggattgtaaaatccaaaataaacttttctggcagcttcgatatcttctgcactgtccgtgtatggataagccactcctccggtcggtgcaaagccaatctggattttttgttttgcatattttcttaaattgatcactgcctgtccatgcgctttcaacagattatgtgcaatctggaaagtctctggaattgataatttcaatcccggtgcatggacaccgcttaaatgcccaagtcctaccacacactgtggctcattgatcgtgataaaatactcgcagagatccgaaaaattctctgccaccacttttgcatattccccgaaccagtctaccacttcctcattcagccagccgcccttttcctgcaacgcctgtggaaactcccagtgaaacagggtaatatatggtgtaatgccattttccttcattgtaagaatcatgtcgcggtacatcacaatcgctttttcattgacacgcccggtgccctccggcagaatccgcgcccagtttaaggaaaaacgatatgctttgattccgagatttttcattaatgcatagtcatctttataatggtgcatatggtcacagcttgtgtacgcattctgattttgaaaaatgcgtccctgctccgtaaaagtgtcccagaccgtctttcctcttccgtcatccgggtcagttccctctacctgatatgcactgcttgccacgccccaaacaaatttgtcatcaaacatgtgattctccttctctgtttctggttgttatttttatttttgtatagatattaaatctaaattatatatttactttttctcagaggcaatcacaacttctgcaaatattcatttatctattcttccacaagatccttttttaatgcttccagtttttcctctgcatcctgcaaagaggtgcctttgactccatagtagaatttgatcttaggctctgttccggacgggcgcacacagcaccatgcattgtcagaaagttcataatataaaacattggaagccggaagtcctgtttttgtcacttccccggtctttaaatcttttcttgtatcctctttgtaatcgcggactgcaagcacttcaaatccaccgagtgttttctttggattgttccgcatatcactcatcatctgctgaatctgggcggctccgtcgattccttttaaggtcatcgtggaaagtccctctctgtagtaaccgtatttctcatataggtcgatcatggcatcccacaatgtttttccatgttttttgcaccaggaagccacctcgcacaacatcatgactgccacgcaggcatccttatcccttgcatatgttccggctaagcatccataactctcctccagaccgaatacatagttgtgggagtggttctgttcaaaccatttgatctgctctccgatatacttaaatccggtcagtacctcgatcagtgccacgccgtaggaagctgccatcgcttttgccatgtccgttgtaacgatagtctctacaagtgcaggattctccggcatcgttccggttgctgttttctctcttaaaatatattctgcgatgagcattccggacatatttccagtgaaagtcacatactctccggtcttagtatctttgcagtatacgccaaggcggtctgcgtccggatctgtcgcaagcacgatgtctgcatccacttcttttgcaagttttaaggcaagcccaaatgcctttggagattccgggtttggatatgctacggtcgggaagtttccgtccggaagctcctgctcttttacaacatagacattttcaaatccaagttcttttaacacacggcgcaccgggagatttccggttccatgtaatggtgtgtatacaatcttgatgtcttttgccatctctttgatgatttccggatggatggactgttttttcagttcttccatgtaacggtcatcgatttcttttccgattgtcacaaaaagtccggctttcacggcatcctcttttgtcatggtcttaacctgtgtaaaagaagttacttttgcaacttctgcaaggatatttttatcatgaggcggtgtgatctgtgcaccatcctcccagtaaactttgtatccattgtattctcttgggttatggcttgctgtgatcacgattcctgaaacacagccaagttcacggactgcaaatgaaagctccggtgtcgggcgaaggctgtcaaacacataagccctgattccgtttgcattcaggcagagtgctgcctcctccgcaaattccggtgacatgattctggaatcgtgtgcgatggcaactcctttttcctgtccgttctgggaaatgatatagtttgcaagtccctgtgtcgcctgtcttactgtataaatgttcatgcggttcgttcctgccccgatcacaccgcggagtccgccggttccaaactcaagctgacggtagaaacgatcctcgatctctgcctcattattcttgatcgcttctaattctgctcttgtttcctctgaaaaatatgggtttgtacaccattctctgtaggtttccatgtaactcatcgtaattttctcctatcttcttcctgctattttttgaaagattttactttcctctcaaaagattattgaaataataaccttattttaagtaaatgtaaacttattttagcttatttgtcttaaaatcatttcacaccattcgtcatcataacggcaaagaaaccattcagatttgaatagacaaaacacagcacgatcattccaatgaccgataccgccattccgattcctgataaaatcatacctgccagtgccattccgtttttctccggctgcacctttctcgaaagtctgccaccgatcagtccagcgattccaatgccaagaccatatcccataaagccagtcaaaatggatatcattccaagtgcaagcgacagcgcagcgtttctgtccgcctcctcatacgtctcaaacaccacgatatggtttgcttcctgttctaattccagtaattttctcggacggagcagaacaatacttggaatcagcaaaaccggaaccgcgatcagattaaccgcagacatctggttgatctgttccactgtcgttccaatgccaaatatgccgcttcccatgagacttgcaaaatccactaatgcatgaaacatgatcacaagccagatatttcccgaccgtacataaacggcggcaaagatcacacctaaaaatgctccgttgattgcctgaatcatcgcgcttgtcacagttactccctgtgaaatattggtcagatgaaccgcgccaaacagcacaccatttaaaatgactgcccataaaatcccacgttttgtttttgaaaaacgctctaaaaacagattcaggatcactccgcggaaaatcagttcttccgtccagccaattaagaacatggttgcaataaagaacaggatttccagcgcagataccacttttgcatccggtgtcatcatctgcacataaagctgtgccgccagctccagacagcaataacctgtcaggaatccaccgatataaagtccgtggataaatccttttcctttttcaccaagcaccctgacatatccgaacagacataaaaacaaaaatgcaacaactccagccacaaactctgcaatcatactgtttccataccccggaagtgaaactgtcctgccaagaaaaaaggctgccacatccatacttcccagaaaaatcgctacgatcagtaccgcaacgagtatcgtaaccaccttcggcattctcataagtttctttttcatgttcttctcccctttaattaatctttccatcagcaccgatcgtaatgccatctgaaatctgtgtcatatattgatacagcgcagatgcactatttgtatccatcagttttgtcgtgccccctgccgcatagaccggaagcagttcataagatacagtatcgtctgcttccacctgcactttcactgcaacggttctgtcaatgctctgcccgaacacaaaatttccaagactgtaaaagaccggttttccttctatgtaagagattccctgcagacaatgtgtgtgcgctcccaacaccagatctgctcctgccgcaaaacagtcagatgcaatcttcgtctgatactcctgtgggtatgcatcatattccaccccccagtgaatatagaccgaaaggaaatcacattcgctctgtgcttctttgatcagctggactaactttgtatcgtcataagccgtcaacatgcccggcgtgcgttcttctaccttccagtttgattccggcactacgcgggatgctgcaagaaatccaaattttttgccattcttctcgatcacctgaagttcatacgcccgctcttttgtatcacctgctcctgcatacaaaatatcagcctgatctaatgtctgaaaggtatctgacaatgcatctcttccataatccaaggtatgattgttggcgagtgatacaatatccacgcccatctcatttaaagccttcacatatttcggatcactgcagaacgtaaactgtttgttctccatcggttccccacgattgctgaacgggaactcattattcaccatgaaaatatccgcatcctgtaactgttttaaaagctgtggctcaatcactttttcaataccgcctgcgtcatagttgcttttaaatgcattggcaaagagcacatccccggcaaaaatcagcgttgtgctgccgtctcccgtggtatcgtctgcctgtcccggttcattctctatttcctctgttgcacccgattctgtctcattcgtttcttcctgccctgtgccattattcagattcttctgcccttctgcggtgtctgtatgattttccggcgtctggatctgttcttccgtgctcaccacatctgtctgcgccattgcatcttctgttgttttcccttgctgccttccgcgtgaaaaaatgatcagtgtcaccatcgcaagcagtgtcacaagtgacagtgcatataaaataattcttgttctttttcccattccctgctcctgtttttcttaatcattaattgtatatatgaacatgctgtatcccttaatctgttttttataaccgttttgtcatgtccttttttatttccaattcattatacactatttctgacattttgagaaattttctataaagcaagttttaacctgaaataatgtggaaactttcaccagaaataaattgcactaattttattggtttattataacaacgagtgagcttttgcagttaataagtttgttagttagtgttgccggattattttacctcattggaaaagataatcacggcagaaaaaaaatagccgtccccggctattttttcttctttactgctgtgtcaaaacatcaatatctcccactcctgcagtcagttccacttctgctccgccgttgctgccggtctcgtactccgcatcaaaagcccctttcgaccgcccgttcaaccggatttctccaagtccggcagacagatcaaatgcatagcttttctctgttccggtaagagagacactgacatcgccggttcctgcctccacttcgagtttatttaaaacgcttccgctgaatacggtatctccaactcctgcttcgatggacaccttcgggaactgtccattcagaatcgacacatctcctgttccgacttcaaacacagctttctcgctggctgagatctgattcacagagatttctcccgctccaacagacacatttacttttcttgccgtaaatgcttcgctttccatggagatatccccggctcccactacaatgtccagtgtcatattttcacactgccttggcagaacgacagtaaaggtcggtcctttctcaaaatggtggtgtccgctatgataagttatctttagatcagaatccttctgttttgcagaaagataatcctgatacccattttccatattaatgctgatctcatccgcagaatccgacacttcaaaaataagttcatttaccacatccagttccagtttcagggaagcagcttctgaagccggataaggtatgatgcagctttccgtccctgccggttcactcttcatatccgtaagattcagaatccaggaaccaaaactctccaccgccctattatcatccatggacccgtcatcctcatcgtcccagtcgtcatcagcccaatcttcgtcatcccagtcgtcatcagcccaatcttcgtcgtcccaatcatcatcgtcatcataatcatcatcccaaaaatgatccaagataccatgtccctgatcataagcataataaactccattgccaatatgccagttaccaaaatcaaattccccggcaagtgctttccggtggatagttgaccatccggctcccatcactgtggcgataccgccgaaaacaattccaagtgctgctaagcttcctgcaatgatcaatataatctttgtaaattttttcatttcacctcacactcctctctttctcttgccaaacgcctttttgcaaagctctgcaataccttttactgcccatgggacaaaccagccgaagcaccataccacgagccacactgcaagtactccaaacgcaagaaccaaaagtccaccgcctaacagtccaagacctactgccacaccttttgtgaaaagatatccgataccaacgccggccaatacaaatccagtgatcactaacgacgccatcaccgccacaatgctgaccgccactgcaaatacacacgctaaaattgctacaaggattgccgctaaaaccgctgcaaccgtgatccagaccggacttgtcaaaactgcgaggatcacccataaaactgttttttctgttttattcttctgattttcctttttcagattctctatatcgatctgaccggatgtattctgactcccataagctgctcctgcataagcagtatttttctgttcataattgccagaaccgtaagtactgcttccatataaactactgctgtaagtatcctgcgtttcttttcgagtatcagctccgctctcaccttcactcaccgtatccgcatcagccgtttcaaccacaccaagatctctcttaatagcctctgccaccttctccggcgactccagttcctctaaaatggatgcctcatttccaatccctgcatcctcaaaatagcttctgtaaaaagcaagtgcatccgttctctcctcctctgaaatatccgaaagcaactgctccagacgttttaaaaattcttccttattcattcctctgactcctctcctgaaaataactccgatattttcgaagaatatgattcccattcactgcgatactctgccagcttttcttcgccgatctccgtaatctggtaatatctccggtttcttcctccgcactccctgtcatacacgatcaggtatccatccttttgcagtctccgcagaaccgggtacagcgtggactctgaaacttcaattgctttccgtacgtcctgtgtgatcttatacccataagttccttcttcctccttcgacacgacagcaaggacaatcgcatccaaaagggctgcgcctgtattaaataccatgtactcactccttttttcgaaacagataccaaaatatctgcctctttattctattatttgttctgtaatattatttcttgtttaatactatatatcatatagtattgttttgtcaatattattattaaaatataactggcatggttaatttgttgtaaactggatttttaattcatgacagtttttgtatatagtaattccaacaacaatcctgggaattgaaaaatccttctatatataagaaggtaccgaatcattacaaacaaataacagaatccgcagggattcatgcaaaggagaatttatttatgaaaacatcatctaccactacagcacagactgctgattcaaagtctttatcaaatatccgttttatcacgatcacggctctttttattgccctgacctacgtattcactgcatttattaacataagacttccaatcactgcaaacggcggattgatccacctcggaaacgtacctctttttatctgcgctattatttttggcaggaaaagtggtgcgatcgccggtggtgtcggaatgggactttttgatctgctctccggatggactgcatgggcaccatttacactgatcatcgtaggacttatgggatatgccgtaggcgccattactgagaaacatcacggttttggctggaatgctcttgcgatcgcggttgcctgcgttatcaaagtcgttggctattatatcgcagaaggcattatttacggaaactggatcgcaccggttacttccattcctggaaaccttgtacagatcggtgttgctgctgtcatcgtacttttaatcgttggccagcttcagaaaattgtaaataaaatgttataatctgtgtaacgcagaggatttacaaaacaatatattataaagaaggaagtaattatgtataaagtcatgacgcctggtcctacccaggtaaaagaaaatgtgcgtatggcgcgaagccttgtatgcaccaatcctgatcttgatgaggattttgtggaattttacaaagaaacctgtgaactgatcagttcactgcttggtacaaaaaatgaaacgctcattttagacggagagggaattttaggactggaggcagcctgtgcttccctcactgagccggaggataaagtacttgtcattgaaaatggcgtgtacggcgaaggttttgctgactttgtcaccatgtatggcggtgtgccggaattttatcatgccgaccggctgaatgccattgatccggatgctctttcttcttatttaaaagatcatcacgattataaatatgcgacagttgttcactgtgatacgccaagcggtatgctaaacccggtcgaaaaaatctgccctcttttaaaagaatacggtattttatctgtggtggattctgtctccggcatgttcggaaatcacgtggacgtcgacaaattccagattgatcttttatgtggcggttcccagaaagcagtttcagcccctccgggacttacctttgtcaccttaagcgatgccgtcaaagaagccatgcatgcacgtaaaacaccaatccgctctttctatgcaagtcttctcgcatttgaaggctattacgagaaaaaatggtttccttacaccatgccgatcagcgatatttatggtttaagagccgcatttgataatattgctgctgacaccgtattagaggaacgcactcaccacatcgcagaggcaacgagaaaagctttgacgaaagcgggtataaagcttcacttagagagcggtttttccgatacagttaccgtctttgacattcctgcagagacaacctgcgatgcgattctctcccgcatgaaaaaagagcacagcatcatgcttgccggctcttttgacgacctctctgggaaagtgatccgcatcggtcatatgggaaataatgcaaactttgaggatatggctgcaaccatgtatgccttgtcggagactttaactttccttggtgtgaaattaaatggaaatctcgcagagctgtttttgaactattacaggcaggaagatatttgctaatccaatctaaagcatttctattctgaaatcctgttctgacatgaaaaaattacggaatttgctccaaacatgttccgtaatttttttattttcttcatctgtcgttgcatttctggtaaaaagagtctaaaatgaatgtaatattaagaaataacgaattctttcgaattattctacataggaattcataaaaaaatccaaaaacgagcttaacttttcaacccggaagtgaggatttatatgaaacacaaaagagcaaccctatattatatcctattatttaccgcagcattactggtgattctgacctccattttccatacctcacgccagatcaatcaagacgtgaacttggaaatgcaaaatacactgcacgatgtggcaaaccagaacgccgtcattgtctatcaggagattaaagataaattcgaccttttatacagcattgcagatacctcagatccagcctcatttgaggatctgtcctcaatcaaacaatattgttcctttgtcgacatttaccagttcaagcggatcggttttatcgctgcaaacggacatgttataacaacagacggttacacgcaggatctctcggaacgtgaattttttcacgacggaatgaagggaatcagcggtgtgacttccactctgcaggatcatattggttccaaggaaccaattagtgtattcagtgttcctgtttatcagaacggctctgtctatggtgttttatttgcaacctaccgcacaaagcagtttcaggatcttctcagtgtagaatcctttaacggagaaggattcagctgtatcgtgtcaaagaccggtgaggtgattgtttgttccaacaatgctccggcatttttgcagaatgttgataatatttttgattatttttcccagtcatctgcgcagactgatacacagtccgaacacatgaaaaatcttcttgccgtaaaagaaagcggttccggcgagttctttggtgacgatcagaaatactattatcaggcggttcctctcgataacataagatcagaccgccagtggtttgttttcacgattgccccggaatccgtactgatcagcaggacaagcgatattctcggtcatgtgcgtattctgatcctgattttgattcttgtccttatctgcggactgctcatttatatgtacggcatcagcttaaaacaggaacaactacgaaaacttgcctatacagaccaacttaccggtgctgacaactatgcacggttcaaacagaaaatgctgtcccagtccggaaatcatggcttttacgctgcgatcgatctgcaggattttaaactgatcaacagcacctgtggtattgtaaaaggagatgaaaccttacagtctgtctccaaagtgttgcagtctcatcttaaaagagacgagttctttgccagaatcgatgccgaccgttttcttgtcatcttctgggataaagataagacatctttggagccaagattgcagaagatctgcaaagaccttgaagcgttatctgtcgaactgaatatcccacgtattttccctctttttggaatttacgagacttcagatcatcaggaagtcgaacagaattatggaaaagcagttcaggcaaaacacattataaaaggcaatcgcagccgccattatgctttctatgatgagatcaatatgaatcagattctggaaaataaacagattgaagatcattttgaaaatgcgatccagaatggagaattccacatctggtatcagccaaaggttgacccgcagaccgcgcacatccttggcgctgaggctttgatccgctggcagcgtccagacggcacactgctctcccctgcaaaattcattccgctctttgaacgggacggcaacatcactgcattagatgaatatgtattccgcgcagtttgtaaccagcaggaaaaatggcaggattccggtttcccaatgttccctgtttctgtgaatatttccagaatcagcctgtatttcagtaacattgtagaaaaataccgcgatattttagattcctatcatctggatccaaaatatgttcctcttgagatcacagaaagtgccacgattgacaacagcgatattgcttccctgatcgatcagttccacgaagccggcttcacattgctgttagatgattttggaagcggttattcttccctttcctctttgaacgagatgcactttgatacgatcaaactcgacaagagcttaattgattatatcggtgatccgaatggcgaaaagctgctccagcagatcactctgttattacaaaatcttggaatgtcaatcaccgcggaaggtgttgagacagcttcccaggtaaaattcctcgaaaatcttcattgtgatgatattcagggatattacttctccaagccattaccattaaatgattacgaaaaattcgccctgacgcaccgataggcgccaaggcgaattttttattgtcaatcatatattctctttttcgtgctgctaggcttctggttctgcatgtttgataattccaatcccaatcggatatggtcctgtgtgcactccaatggttgctccaatctggtaaatgccgatcccatcaattccaagacgttctttgatcagatcctttaacatctctcgaaattctaaagcttcattatgatcatatccataaccgatgcagaagctgtactctcccggttttgcattgacttcatctaaatattcccttgtcatatccacgacttttttcatggatttgagacgatttcttgtaatgccagaattaaagatctcgccttcttttaacgtgatcagcggtttgatttttaatgcactggctgcaatcccggctaatttgccaatccttccgccatgttttaaatagtcaatacttccgatcgtgaaaaaaattcttcctgtctcacggattggaagcaacgcatccacgatctgctgatactctaatcccatatcacgcagtctgcacgcctctaatacatataacccctgcagcacagtattgaccgtagagtcaatgaccgtgatctgtgcatccggaatatcctctaacaccatatcctttgctgttgttgctgactgtaaggagccactgaattttctggtgatacagatacagatcaccggaagattctcctcggcatgttttttgaacaattcataaaaatcattcacggatggcatggatgtcttcgggaaaacagtcggatgatccaccatctcctgataaaattccctgacatcctgttccaccatttcttttttgtaggtctgactgtcaaaggaaacataaaatgggactacttctatatccttctcctttgtcagttcctgtggaagatccagagaaccgtcactgatgatctgtacttttttctgcattataaatacctcgttttctttatttcgattgtgttcttaccacacagttatttttcaatctaaaaactatgaatcatatctctgtgtttttaatgtagtttttaatactacatttcaaaacatttttattatatcacagggtatttaagttgtacattacttttactattattttctaaatttttaatatttgccacaaagaaaaaactaccatgtaaaaacatgatagctttcttatcttaccggcagctcgtactaatggattcaattgcgactgctccaccacgtactacctcgattgtcttaaattttgattttaacagggcgatcagttcattgttcctgcgcgctgtcaatttacattccaacaatacactgtcattgccgatatccacaacctgcacattaaacacctgtgcgatctggaatacttcctctttctccgctgcattcacacgaagaacctttgcaaacaaaatctccttcatatgaatcggcacatctgtcagatcaattactttaatgacttcaaccatacggtttaactgctttttaatctgttcaaaagtaatatcatcactggtaacgcagatcgtcatgcgggaaaccgtttcatcctctgtcgtaccaacagtcaggctctgcaaattgtatgatttcccggaaaaaagaccggaaaccttcgctaaaacaccaacctgattttctacatataatgcaatccatctatctttcatattaatctccattcttgcactgctttcttattttaagatcatctcactcattggatttccaccttttaccatcggaagaactatctcgtccgaggagatcaaaaattcaatgatggttggtgcatcctgataagttcttgcctcatctaaagcagcctgaatgtcctcttctttttctacacggatgccatgtgccccatagctttttgcaagcgcaataaaatccggtgtgtatggcgggcacgcttcgtttggtcccttgcagtttgccgggcagcttcttctctttctaagacatacagcagaataacgttttccatagaaaagctgctgcatctgacggaccatgccaagatactggttgttcagcagacagatgatcaccggtgtaccttgtacgattgccgttgccatttcctgaatattcatctgaaaaccgccgtcaccggtaacacagacaacttctttgtcgcggtttccgatcttcgcaccgattgctgccggaaaaccaaatcccatcgttccaagtccgccggaagtgatcatctgacgcttttcatcaatgtctaaatactgcgttgcccacatctggttctgtccgacatccgtgacaaaaatcgcctcatcaaatgtattattaatgcgttccatgatcatctgcggtgtcatgccacggtctctgcgcatctcaagcggattcttttcattccacgctttgattttctcctgccatgctgttgtatccttcggctccgcccattctaataacttttctaaggcaagcttcgcatctgaaacgattggaacatccaccacaacattcctggaaatagatgctgtatccacatcgatgtgtacgatctttgctttgggtgcaaactcattcagatctccggtgatcctgtcattaaatctcgttccaatggaaaataacacatcacactcactgactgccttgttgcacgcatactttccatgcattccggtatttccaatataaagcggatgtgtggtctggatcgcaccctttcccataatggtcgtcacaaccggaacattcattttctccgcaaattctttcatcagatcgttagcttttgcaatattcacaccgccgccagccaaaatcaatggttttttcgctgacttcaacagcttatatgcttttttcagctgtccgatatgtacactctcattcggcttgtatccacggatctgcacactctccgggtattctgccggtccgctcgctgtctggatatcctttggaaggtcgatcaaaaccggtcccggctttccggtgctcgcaatgtggaatgccattttaatgatttttccaagatctttccgatccctgaccgtcacgccgtactttgtgatgcttcttgtcattccgacaatgtctacctcctgaaaggcatcatttccgatcaggcttaacggtacctgtccggtaaaacagactaatgggatgttgtcataatgcgcatccgcaagtccggtcatgatattcgttgcacccggaccacttgtcaccagacacacgcccacttttccggttgattttgcgtatccctctgcctcgtggagaagtccctgttcatgtctcggtaagacaacttcaatctcatcctgcttatataattcgtcaaaaaggtctgttaccgttccacccggataaccgaaaatggtatcgacaccctcttcctgtaacgcctttacaaataattttctacctgtaatatccatctttctgccttaccctttctattttttatctctcaggtaattgcgaaactctaatttattctataaaggatgtgacgataaaacaaaattttcgaaaacacgctttcgctacgtatcgctcgcaacggtactagcatgccagccacagctaacgctatgcctgccaagcaagaaccggcggctccccagtgttttctcaagcttttgtttcatcttcacatctcaattcacactttctatgagtttcgcaattacctggcatatctctaatacttcatctgattcgctaaccgatataccccagtgttttgagtaaaaaaatccatccagtcaacgtaaacgccgccatcaatgtcgttgttacaataacgcttgccgtcagcacttcatcattgttcatactctttgccataatataacagctcggcgtagtcggagatgccagcatgatcagaattgcaatcatcttctccccggaaaatcccatccatgcagcgaccggcagaaaaacaagtggctgaagcaccagtttgatcatggacgccgccatggtcggtgcgatcttcgccagcgcttttcttccctcaaatcctgctccgatggtgatcagtgccaaaggagttgccatctgcgccacgctgctgaccgtcttatttaccagcgtcgggaactgaatcccaagcagtcccacgatcagtcctgccaggatacttaaaatgatcggattcttacatatattgattcccgcctgtcgaatctttgctttcttgtcaatccctgtgctgtcatttgcctcaaatgtcagcacgatcacggaaaaaatattatagagcggcactgcactgacgatcatcagcggtcccattgcagaggaaccatagatattctggataaaagccagccccataaccgccgcacttccgcggaaagacgactgtacaaatgccccgcggatcgttttgtcccgcaccagaagctttgctgtaccccataccacccagaaacagatggtactcacgatcgcacagaaaagcacatatttaatatcaaatactgctttaatatcaacgcccgcaatgtccttaaacagcataaacggaagcgtgaccttgaaattgaacttatttgctactgtgacaaagttatcattcagcattccgatctgctttaaaatgtatccgatcaccatgaccagaaaaatcggcattgtcacgttgatactatagataaaattttccatttttttctttttcctatcaggaaactcctcgttcaagtaaaggtaaaacccagcagtctctctgtctgggttttagcaattataaatcaattttcatctttttggtatgatatattttaacaactttattgatattatttaatcctctcgtatttataaaaataatattccagatcaaaatacgtctgttcctcactgtcctgcgtgattttccactccggcatctcatcaagattcgggaaataggcatctgcctcaaacgcatagtcgatctttgtgatatgcgccacatcacagtcatcgagaagctgtttataaatggtctctccaccgatcacataaatatcctcacttggatatttctttaactcttcccgcaattcttccatcgaatgaacgataatggcatctcccgccttaaaatttttatcatgcgtcagcacgatgttcactctttttttgagaggctgtccgtttggaaaactctccaacgtttttcttcccatgacgaccactttcccggttgtcgtctcgcggaaaaacttcatgtctgccggaatactcaccagcagtttattcttacatccgattgcccagtttttatctacagctgcgattaaattcatatttcctccaacttttcactctgtatcacttgtcagtgccgtgttattttatcctgtcttttatcctctcataaaatattccagtcaggcttatactgcgatcggaatatttttgatctgtgatcccgtcacataatcctcaatggtaatatcctttgttgtaaactgataaaaatctttgatctccgggtttaatgtgaattttggtgccgggtgctgctctctctcgatcagttccttaataatcggaatatgacggtcataaatgtgcgcatccgcaatcacatgtactagctcgccgacctgcatatcacacacctgcgcaagcatatgcattaataccgcatactgacacacattccagttatttgccgctagcacatcctgggaacgctgattcaggatagcattcaaagtcagcttttcatctccctctttgtgtgtcacgttaaatgtcatactgtaggcacacggatataaattcatttcatgaagatcctggtgcacataaatatttgtcataatgcggcggctgaacggattatgtttcagatcataaatcacgcggtcaacctgatccatcatgccttctttatactgatgttttacccctaactggtatccgtatgcttttccgatggaaccatcttcgtctgcccattcatcccatacggtactgtttaaatcatggatgttatttgattttctctgccagatccagagcatctcttccgtacatgttttgatggcagtttttcttaatgtaattgccggaaactcttttgagagatcataacggttgaccacaccgaattttttgatcgtgtaggcactcgttccatcttcccagtgtgggcggactttctcgccctccgtgcttgtcccgttctctaaaatatctttacacatatttacaaaaattttgtccgcaagactcatctttttctatccccatctttctatcattttgcacatttgaaaatctcattctttcgtacctttgcagtaaaatgcccatgtacgatccgaacagtactattctatccaattttcgtataaagtgcaagaaataacatcccgactgttattcgaatattttatgactgcgatatatttttgtcataaagttcatttctgtttctaccaaatttcattgatttttccagtaaaatgcagtatagtgaagaaagtttaagaagttaggagattgattatgagtcaggcaaaagtagaccgttataaagaagaaaaaaagaatcgtaagaaaattatggcaaaggaaaagagaatgcgtatcgccggttatgtcgctggctgtcttgtcgctgccggtatcatcggctgggccggttactccggatacagtgcttatgaggcaaacaagcctatggaaaccatttatgcaaaccttgattccgttacagactatatgagttctttaaatgcggaataaaaattactggaacgaggtacgagtgaacagtaacgattaaaataaatcaataaaacagattaaaaatcgaccattgactttaccagatcaaagtgctattttgttattcaaacagagaacaaaatgcaacgaacagaacaaggttatctgagcaacctgtatcacagagagctgccggttggtgtaaggcagtatacagcttcaggaactatcctctgcgagcagtgcactgaattttcatagtaagtgtcaccggtattctaccgttatttagaagcttattgttgtaggcatctgcccacaaagataagacagagaggtcgtattttacggcaaacaaagtggtaacgcggaagcttaagccttcgtctttgagatatgaatatatccggagatgaaggctttttttcatgccagcagactgtgcgcaggatgtgaatcccattgtttccactttgcacaatgtattttgttcccagaaaaaaatacattttcagaaaggagccgccttaaggcggaaaaaagttatgaatggtttagttattgttttgatcggtatcgttgcacttggcgctggctacctcttctacggacgctggcttgcaaagaaatggggaatcgacccaaatgtaaaaacccccgcttacacacatgaggatggcgaagattatgttccctcctccaaatttaccgtattctcacatcagttttcttccatcgcaggtgcaggtcctgtcacaggtccgatccttgcatctgtttttggatgggttccggtattgctctggctcatcatcggcggacttttcttcggtgctgtacaggacttcggtgctttatatgcatccgtaaaaaatgaaggtaaatccatgggtatgatcattgagaagtacatcggtaaaacaggtcggaaacttttcatgttattctgctggctttttactttattagtaatcgcagcatttacagatatggttgccggaacatttgttggaaccggagttgaaggtatgacagatgcaacctcttacgccaattctgctgccgcttcgatttccatgttatttatcgttgtcgctgttatcttcggtgtgatccagaaacaccttggaagcaggatgaacgaagttgtaaaagcagttgttgctatcgctcttttagttgtgatgtttgcagttggtatgaagttcccgatctgcacaacaaaaacagcctggatctacattgtaatggcttaccttttccttgcatccgtcatgccaatgtggcttttaatgcagcctagagactatatgacaactttcatgttgcttggtatgatcatcggtgcagttgtcggtgtcgttgttgcacatccgaccatgcagttaaatgctttcagcggatttaatgtaggcggaagcagtttgttccctactttatttgttacgatcgcctgcggtgccgtctccggtttccacagccttgtatcttccggaacatcctcaaaaacgatcagcaatgaaaaagatatgccaatggttggctacggtgcaatggtcgtagaatccttacttggtatcgtatccttagtcgttgtcggtgctgttgccgtcaacggaacaaaaccggacggaacacctttctctatcttttcttccggtgttgcaggtttccttgaaaaacttggtgtccctgtctccgttgcaactgtatttatgactatgtgtgtatctgcacttgcacttacatcacttgactctgttgccagaatcggacgtatgtccttccaggaattattctatggagattctactgatccggcaactatgactccggtacagcgtgtgcttaccaacaaatatttttctactgtgatcacattattctttggatacttattaacacttggcggatacagcaatgtatggccgctgtttggatcagcaaaccagttacttgcagccctcgtattgattgctcttgctgttttcttaaaaacaacaggccgtaccggctggacactttatattccaatgtttgtaatgttagccgttactttcactgctctggttcagaaaacgatcgcacttgtcggcagcttcatgagtggtaatgcaacacttcttgtagacggacttcagtttgtggttgctatccttcttatggtacttggtgttatggttgcattcagctgcctgaagaaattatttggaaaggaagcaaaagcagaagcttaatttcttaaatataaaacacaacaatcgtcaattgtttcacaaaaaaatgatatgtcaactgtctgatggacaaagacatatcatttttttactggtttataattattttattatcatatccggctgcatcggattccatttacaatatcctgcttcttactcaatgatcagacgtacctttggcagtctggctctgccttttcgctttggcagatgtactgaatacacatctttatatcgataaacactaaggataactcccattaaaatgtagcatacgtacatacagcttcctcccttagagaaaaatggaagaaatgtctgggaagttgggagaattccgaaattctccagtaaattgaccgctatattcacaaaaatgatcattccgcttccaaatcccatcatcatgccaagctggttcttctgatggaatacggtagaaaaaatggcaaatacaagtaatgccagcactgcacagattgcgatacaggcgatataaccataagttcccgtcagataggcgaggataaaattattgttataatccggaagtgttgtctttaactcctccactccatttcctacaaggatgctgttcgcaaaacagtcttttaaggcgcgtgtcacataattccactcgacatctcctgtcaggaaattacgaatcctgtctatctgataaggtgcatttgcgatcaacaggatgcccggcatcggcaaaaccagaaatactgctccaatcaccatcagtacgcccttccggttcacctgaaaccagttttgggcaataccaagtatcagaaggctcaccatgcatacgaacaggatcacaaacagagtaaggcttggcagtcttaatgcgataaaaagcggtggcactgcccataaagctgcttttaccagtcccttatatccttccccataataagagtaaagaattgctccatataccgggacatacaacataagaaaagaaaacatcgatattctaagccataacagactggctacccagatctttccaccaaacgtgactccaaaaaataaagcatagataccaaccaggataattcctgcagcgatcacttttgcaattgctgcaatccttgtataatccagatgacagataaaaagcatcagacaaaatcctgaaatagtctgcatacatgccactggtgcacccatcatccaatggatcaatactcctgcaaacatgatcactgccataagtgcgatcatctgccatgccatctttggtctgtgtatctgatccagcgagattccggtagtcaccgggtctcccatatcacaaacagccgccttctctgcttcctctcttgtcattccggcttccatattatcttcgatctgatcggatatatggctttctaattcctcacggattgccgcatgtgcttttttgcaacggatctggtctaacaaattcttcaaatattcttccatctgtcacacctccattgccagtacattggtcacagcagtctggtattctttccactcttcctgcttctgctttaacagatgctttccttctctggtaatgctgtaatatttacggactttcccggtgcattctttctcatatacggtgaggagccccttctcttcgagtccatgtaaaagcgggtaaagtgttcctgcttttaactcgaatacattctcggacttctgtcgcaatgtatcgatcatctcgtagccatacatatccttctcggataaaagctttaaaataagcatcgtcatgcttcctgatatcagtgacttatcgactgccatagattgttcctctctttcctttgttccatgcatctgctgcatttcacaacatttagatatccaatatatagatactctatatatcggttatctatataatatatcggcagtctatatatgtcaatcatttctgcaattttttctctacgctccttcaatctccttaatgctgaatccgtttccttcaagaagatacgtcgcactgctgccacaatacggacatattttggcatattggactgtggaatatgtctttccacagtcctcacatactgtcacgcccggtatgatctctgttctcaattctgagtctttcaaaagcccggatttctttcttgcatacccccagcaatctgtcaggtattccggcacaacaccgctcacttccccgatttcacaggtcacagatttaatctctgtaagttgattctcttcggcaacctcctctaccattcgcatcacatgtactacaatacctaattcgtgcattactttctcccattactatttttttctgaccaaaagcccttgtcctgtaggaaataatctactgaacctcactcggctttttcatcacttcctgctgtatccgattttacctgttcttctgtaaaaataagcttcgcatcaattgcaaatttcggctctgtatacacatcaccaccgactgcgatacaccagctttccggatcatctgcacatccctgctccgccttccggtaccatcggtgtcactttttcaagcggcaggcggctcatgcgttaaatgcctcttcgctaggcctgatatgtctttacctcacggcggatccagtttgcccagtcttcaaatccttcccctgtttttgcagagacaaagaaaatctctgcctttggatttaatttcagaatccgttcttttactgcatctttgtcaaagtcatcaaaaacactgagtgtgtcacatttattgatcaatacgacatcgcagattgaaaacatgagcgggtattttaatggtttgtcatctccttccggaacggaaaggatcattgcattctttgtgcttccggtatcaaactctgccgggcagacaagattcccgacattctctaatacaacaaaatcaagatctttcgttccgaactcgcggattccctgtcttgtcatatctgcatccagatgacacatgtctccggtatggatctgaatggcacgcactcctgtctctgtgattgcctgtgcatccacgtctgaatcaatatccgcttccatgacaccgatcttaagctcatccttcaacatagcgatcgtacgctttaaagttgttgtcttgcctgctccaggtgaagacatcagatttaataaaaaagttccctcttcctttaattcctcgcgaagtctgtttgcatctgcatcattatcctcaaaaatactgcgttttacttcgattactttaaattctttcattgtttcccccattccttcttctgaatcagaataagtttttcctttcgtatacttattctctggtatatccagagataccaggtatatctcggagcgatttacgttactaaaaaagtcccggtacaaaataatctgcaaaaatctgtcagattatcttatactgagactttttaatttatttgttcctggaaaattttcaattaatgctgatagaatctgtggttcttctgtaaaaacattcgtccacactgaaaaaaagccatcactaacagctgtcattatgatttgcctcttcatatctattttaaattcatctggagcatccctatacgtataatcaatgcataattcatttttatcgttcaagaatccccacaaatcattttcattacataccgctgcatatccattcgcgaaacttcttgctttagtatattgaggctctataataattttgccactaacttcaacaaatccccatttatcatctttcttaaatgctactgtttttccatccacacaaatatccatgtcgtctgccgaaaagtcgcttgt

SEQ ID NO: 14293 - DNA, 62420 bp, Unknown
  gut microbiota DNA sequence
aagcgaatgttactatgaggagccgtatgcgggaaagccgcacgtacggatctgtgaggggctaagattgagaggtcttagtctactcgactgttttacgtagttatttttgccattgaggcttaaatataaatatttattttaaggagagtgctttttgatcaagtacaacacaatggagattgtagcgtaaccgtgaggttgcggatacagtcaaacacaacctcccgcaggaatgcagttgaagttaacaacattcaggaggaaataaagaatgaataaaaataacattacaatacgtttggagaaaaaagaagaataccgagaagtagaaaaccttgtaagagaatcattttggaatgtgtaccgtccgggttgcctggagcattttgttctgaatcagttgcgaaataatcctgacttcattgcagaattggattatgtaatggagcttaatggaaagctgattggacagaacattttcatgaaagcggtgatcaaggctgatgacgggagcaatattccaatcttgaccatggggtctatctgcatcacaccagagcttaagagaaatggatatggcaaggtgttgctggactattctcttgatcaggctgcaaagatgggattcggtgcagtgtgttttgaaggtaacattgacttctatggaaagagtggattcgcctatgctagcaaattcggtattcgttatcatggacttccagagggtgaagaagtatcgttcttcctttgcaaagagttgattccgggttatttagatggcataactggagagtatgaaacacctgcaggatattttgtagatgaagcagaagctgacaaatttgataagggttttccatacaaaaagaaacttaagtaactgggacattttttctaaacgaaaaagatttatgatggcggggagataaaatctccctgcctgaaatcggtaacttcaaatttgttgctgataagtaaaggataaagagcagatggtaaaaattgcagttttggcagatatacatagtaattatttggcacttcaagcctgtatagagaaagcaattgatgaaggcgtacagcagtttatctttttaggtgattatcttggggagatggcatatcccagaaaaacaatttctattttgaaacaactacaggaaagatattcctgcgtgcttatccgcggaaataaagaagaatattggataacacatagaaagaatgcttgtgaaatatggaaagatgggaaaacaacaacaggaatattaaaatacgtatacgatcaactaaatgacgatgacattgatatgtttgaagctatgccaatagaaatgacattaaaatatgatggattgccacgatttacaatctgccatggttctcctttcaaggtcaatcaaagcatgcgtccagactatgagtatattgataatttgcttgagaatatgccgagcaatctgataatatgtggtcactttcatattcagactaattatgttagaaacgatgttcgtgtaatcaatcctggtgctgtaggagtggcgttacatagtaatagtttagctcaattcatgacacttactgggaaggacggacattgggaacctcagtttttttctgtaggctatgacgtagataaggttattaatgaaatggagaaagaacgattggattttaaagcccctggttggtttagaatgacaaaaaatctgttaactactggccaaaaatcaatagttaactttatttcagaggtacaacaagtttattacaaggagacagggatatcagattatagattaattccagaagcattttgggataaaaccctgactcgacttggaatataatgaataacagattctagtttttgaaactgaataataggaaactgcgaaatggtaagagaaatgcttcctcttgcagaaatatatgtgtatgaagatgacaataccaagagcagatttcacaagttatcttcagtgtaaatgaaataaaaatggtacagacaaatacgatttcctttgtgagctttgcgaacaggaacatcatattttgtctgtaccatttttatttttaagatttagttattcttgttgttttctttctgcagttccagcatcttcatagcacgaacttttaatggaagtccgaacagtgtgatgaagccgtcagcatcatgatgatcatacagatcaccggttgtaaagcttgcaagagactcactgtagagagagtatggagaagttgttcctgctttgatgatatttcctttgtaaagcttgaattttacttcaccggtcacatattcctgtgtggactctacaaaagcctgtactgcttcgcggagtggtgtgaaccattttccctcgtatacgatctgggcgagcttgttacccatatctttctttacttccattgtggcacggtcaagtaccagttcctctaactgctcatgtgcttctaagaggattgttccgccaggggtttcataaacaccacgggatttcataccgacaacacggttctctacaatatcgataataccgataccatgttttccaccaagtgtatttaactcacggatgatatcagaaactttcatttttttaccatttacagaagtaggaacacctttttcaaatgtcatggtaacatattcaccctcatctggagctttctcaggtggagtagttaaaactaaaagatgttcataatttggctccaaagaaggatcttcgagttcaagaccttcgtggctgatatgccataagttacggtcacggctgtagctggagtctacagagaatggaagatgaataccatgtgctttgcagtaatcaatctcatcctgacgggactgtaatttccagttgctgtcacgccatggagcgatgattttaagatcaggagcaagtgctttgatacttaattcgaaacgaatctggtcatttccttttccggttgcaccgtggcagattgcggtagcaccttcttttctggcaatctcaactaattttttggcgattcccggacgagccatggaagtacctaataagtatttgttctcataaacagcatttgcctgaacacatggaacaatatagtcatcacagaattcatctacaatgtcctcaatgtataatttggaagcgccacataatttggctctttcgtcaagtccgttcaattcttcttcctgtccgcagtcaacgcagcagcagataacttcgtaaccataagtttcttttaaccatgggataatggctgtggtatcaagaccaccggagtacgctaaaataaccttttctttcataagagtgtatcctttcctttactcaatcttataatgcaaaccgtttctgtcaatatgtaatgataaaaagatgaaacgatgctttctgaaaactaatatatactatgtgaacaagaaatgcaagtgaaaaaatatacataaacagataataaaaatgcataaaattatacagatacaacagatatttatacatgcacagatctattaaataaggtagaaatatataataaacttaattaatcgcaaaaatatcgaaaaaagatattgcataaaaataataatgaatgtataattatgcaagaaataatggaaaccaggaaacaaaaaacactttactatcctaaagagctgtactatgataagaacaaattagtacgttaacgtgaaaaacgatgcaaggtttttatttggagagaaaatctgaagcaggaagagaaaacccataagggagattggagaatagattatggtaaaagttggaattattggagcgacaggttatgcgggaaacgagcttgtccgattgctcatgggacacaaagacgtggagatcaaatggtatggctccagaagttacatagataaaaagtatgcagaagtttatcagaatatgtttgaaattgtagatgatacctgcatggatgataatatggaagaacttgcttcacaggtggatgtgatttttacagcgactccgcagggatttttagcaggtgttctgacagaggagatcttatccaaggtaaaaattatcgacctgagcgcagatttccgcatcaaagatgtgaaaacttatgagaagtggtataagattgaacacaaaagcccgcagtttattgaggaagcagtctatggactatgcgagatcaaccgcgacaaagtaaaaggagcgagattagtggcaaatccgggatgctatacgacctgttcgattctgacagcatatccgctggtgaaagagggactcattgatccggacactctgatcattgatgcaaaatccggaacatccggagcaggaaggggtgcaaaactcccgaatctattctgcgaagtgaatgagaatatgaaagcttatggtgtgacgaatcacagacatacaccggaaatcgaggaacagcttggatatgcagcaggaaaagagatcgtggtaaactttataccgcatcttgtcccgatgaaccgcggtattctcgcaacggaatatgcagctttgactaagaaagcagacggcagtcttccaacttatgaggaagtaaaggctgtttacgataaatattataagaatgaaaaatttgtccgtgtactggaaaaggatgtctgcccggagacgaaatgggtggaaggaagcaattatgtggacgtcaatttcaaaattgatgagagaaccggaagaattgttatgatgggagcacttgataatctcgtgaaaggggcagcaggtcaggcagtccagaacatgaacctcttatttggatttgacgaggcagagggattgaaccttgttccgatgttcccgtagggaggttacaagacagattttacagaacagtgcagtatgcagaaaacgagtcttgtacaatagaagttaagggagattagaggaaacatgaatgatacaaatttaacgatccgcctaatgacaatgaatgatttcgaggaagtacataatctgtggatggagattcatggatttggtatccgcagcatcgatgattcaaaagaaggcgtggaacgttttataaagagaaatccgacgacgagcatggtggcagtgtgtgatgaaaaaatcgttggagcaattctctgcggacatgatggaaggcgggctggtctttatcatgtctgtgtacaggaaaattacagaaaacatggcatcggacaaaaacttgtggaacggtgtttagaagcgttaaaagcagaaaagatttcaaaggtgaatctgatcgcatttaaacaaaatgagatcggaaaccgtttctggcagagccttggctggaaatactgcgacaatgtgaattattacgagtatgttttaaacgaaaagaatataacagtttttaattcataaggatacatagataattacctgaatctaaagaaaagaaaaaggagatcaatcatgaaacagattacaggcggtgtgaccgcagcaaaaggttttcaggcagcaagcacagcagcaggaatcaaatacaaagacagaaaagatatggcaatgatctacagtgaggttccatgtaaggcagccggaacatttacaactaatatcgtaaaagcggctccagttaaatgggatcacaatgtggtatacaacagcaaagcggcacaggcagttgtgatcaatgcaggaatcgctaatgcatgcaccggagaggaaggcatgggctattgcaggaaaacagccgagaaagtagaaaaagtattaggaattgcagctgatgaagtgttagtagcctctaccggagtaatcggcatgcagcttccaatcgaccgcatctgtaacggaatcgatgctatggtttcacagttaaagggtgatttagaaagtggaaccgaggcttccaaagcgatcatgaccacagacacaaaaaacaaagaggtggcagtgaccatcgagcttggtggaaaaacggtaacgatcggaggcatgtgcaaaggctccggcatgatacatccaaatatgtgcacaatgttaagttttgtgacaacggatgcagcgatttccaaagaattattgcaggaagcattaagcacagatgtgcaggacacttataacatgatttcggtcgacggagatacttccacgaacgatacctgtctgttatttgcaaacgggctggcggaaaacccggagattacagagaaaaatgcagattatgagaccttctgcaaggcactgaactttgtgaatgagacactggcaaagaaaatggcaggcgacggcgagggagctactgcattatttgaagtaaagattgtaggagcggagagcaaagaacaggcaaaagttttgagcaaatccgttatcacttcaagccttacaaaagcagccatatacggacatgacgcaaactggggacgaatcctctgtgcaatgggatattccggtgccacatttgacccggagaaagttgatcttttctttgagagtgccgcaggaaaaatgcagatcatcaaagacggtgttgctgtggattacagcgaggaagaagcaacgaaaatcttatctgagccggcagttaccgcaatcgcggatgtgaaaatgggcgatgcaaccgcaactgcatggggctgtgatctgacttacgattatgtgaagatcaacgcagactaccgctcttaatagttacgaaaattttgtcatacttcacagcataaatcagagtttttcattgatttagagaagtataagaatcgaggaagcaaaaatggaagagaagaatatgaacgaacttttgaaaaaagcagaagtgctgatcgaggcgcttccatatatccagcgttttaaccgcaagatcattgttgtaaaatacggcggaagtgcaatggtcgacgaggaattaaaacagcatgtcattcaggatgtcaccttattaaaattagttggattcaaaccgatcattgttcacggtggcggcaaggagatcagcaaatgggtggaaaaagtcggtatggagccggaatttgtcaatggtctccgcaagacggacgaagcaaccatggaaattgcagaaatggtattaaataaagtcaacaaatcccttgtaaaacttgtgcaggaattaggtgtaaatgcagtcggaatcagcggaaaagacggtggacttttaaaagtggaaaagaaatattccaatggtcaggacatcggctatgtgggcgagatcacagaggtaaatccacagcttttatatgatcttctcgaaaaagattttctgccgatcatctgcccgatcggtatggatgaaaattatgacagctacaatatcaatgcagatgatgctgcctgtgcgattgcgagagcagtccacgcagaaaaattagctttcttaactgatattgagggtgtatacaaagatccgaaagatccgtccacactgatctcggaactgccgatctcagaggcgaaaaaactgattgaagacggatacatcggcggcggaatgcttccgaaattaaacaactgtattgatgcgatcgaaaacggagtttccagagtgcatattttagatggacgtatcgcacactgcctgctgttggagatctttacaaacagaggaatcggaactgcaatcttaggggataaggagacaaagtattatcatgaataaacaggattacattgatggagcagagagtgcgctccttcatacatataatcgttttccactggtcattgatcatggggatggtgtgtacctttatgatacagacggaaaagagtatctggattttgcagcgggaatcgctgtgcaggcatttggctacaacaacaaagagtataacgacgcattgaaagcgcagattgataaagttatgcatacttccaacctgtattataatgttccaatcatgaatgctgcaaaacgggttttaaaagcaagcaaaatggaccgtgttttctttaccaacagcggtacagaggcaattgagggagctattaaggctgcaaaaaaatatgcttacacaagggacgtacatgcaggtcatgagatcatcgcaatgaatcattctttccacggaagaagtatcggagcgttgtctgtgacaggcaacaaacattatcaggaaccatttgaaccactgcttccgggagtgaaatttgcagattttaatgatcttgagagcgtaaaagctttgattaatgagaaaacctgtgctattatttttgagacagtacaaggtgagggtggaatttatcctgcaacagaagaatttatgaaaggagttcgtgcactttgtgatgagcatgacatccttttgatcttagatgagatccagtgcggcatgggaagaaccggagaaatgttcgcatggcagcactatggtgtgaaaccggatattatgacaagcgcaaaggcgctcggctgtggagttccggtaggagcatttctgatgacagagagagttgcagaaaagtcattagcaccgggagatcatggaactacctacggaggcaatccatttgtgggagctactgtggataaagtgcttgagatgatggaacgcgatcatatcacggatcatgtgaaaaaagttgcaccatatctggaaaaaagattggatgaactggttgcaaagtatgatttcctgaccgagagaagaggtatgggactcatgcagggagttgtctgtgaaaaaccggtaggtcagattgcagccaaagcattagaggcaggtctgattgtgatcacagcaggttcgaatgtacttcgttttgtaccgccacttatcattgaagaaaaagatgtggatgagatgatatccaggctggagagtattttataatgaaaatagtacagaagagaatgatggcagcaggctgtatcggtgtgctgctgatcggaggtgccgtagtagttgcaaaacaaggtacttatgaacagaatgaaaagaatgtagcaagtgaaacagagacagcatcagttagcagggtggtaaaacagcctgctgatttgacgttctggtatagtgataaaagctatcagaagttttatgaaaaagcagcagaagaatactatgaggatacaggcattgttgtggacgtgcagtatcaggacagtatggactatatggacgctgtgtataatgcaacgatacagaatgaaggattcccggatgcttatatgatcggaagtgatcagttagaggaagcatatctgtatggacttgcagcagagaatacggcatctgaaatttatgaaagtactgtggcagcaaatgcagtgacagcttccacatataaagataagatgtacgcatatccgttgagctacaatacctgcctgtttgtttataaggatggctattttgaaaccgagccggaaaatttacaggcgatcattgactattccattgacaatgaaccgccggagaacgtgcagtatctgttggagtgggatgtgaatgacgcattttatgatttcccgtttgtttctaacagcgttagctttgtaaaagacaaagtggaaacgatgcaggtgagctatgatgaggatttatacaatcaggatttagagttcttttcacagagtcttgagtccttttccattgatgcgtcgactgtgaccgaggagagtgttgtgtctgattttaatcagggaaaaacactctgtgcgatcattgattctgattccgttgcaaagttagagggaacagattacaaaatgcgtgaactgccggcattgaatgatacgctttctgtgtcatcggctgcattgacagatcttgtggtcgtcaacgatttttcagaaaaaaaggaaaaagcagcagattttgcagagtatgtgacacttaccatgtccggggaacttcatggacttggcggacattattccgtgaagctgtctgaggatgcagatgagaaggagcagaccgcttatcaggcatatgagaatgcaatcccggtaccggattctcaggatgcaaaagaattctgggtaactttgaaagaaacaatttctcaatatttttaaaaaattggatataatatatttaatagtcttgtcatatttgtaaaatttcgttaaaatgtattcatcaggcattgagggctctttcatctagctgtagttatgcatacagataggaaggagaatgctatgaatcgaaagatcagagtattcctggtaatcatattctgcataagcatgctttgtggatgtggttccaggaataccgtgtatttagagaaaatacagacagagacaagtgaagtgccacagacagaggaaaaggacagcgccaaagagacaggcggctgctttgtgtatgtctgcggggcagtagtgaatccgggagtgtacgaactgccggagaacagccgtgtttatgaggcggtagcaatggctggcggaatgacagaagatgccggcgcggaggctgtaaatcaggcagaaatcgttacggatggacagatgctgcggattccaacgatagcggaagtactggctgcgcaggaagatgcgagcggtgattcgggtgccacagatgacagccttcttaatatcaatcaggcagaagtggcggattttatgacacttccggggatcgggcagtcaaaagcagaggcattggtccggtaccgcgaggaacatggaaagttttcttcaattgaggagatcatgaatgtggatggaatcaaagagggagtttttaacaaaataaaggatagtataaaggtgtagagatggcaaagaaggttcttgttgttgatgatgaaaaattgattgtaaaaggtatccgtttcagcttggagcaggacggaatggaagtagactgtgcatatgacggagaagaggcactgaaaatggcaacagagaatcattatgatatgattctgttagacattatgctcccgaagatggatggttttgaagtgtgccagcacattcgcgaattttctgatatgccgatcgttatgctgactgcaaaaggcgatgacatggataagatccttggtcttgagtatggagcggacgactatatcacaaagcctttcaatattttagaggtcaaggcaagaatcaaggcaatcatgcgaagaaccgcaggaagccagccgaagaaggatgactctaaggtgatcgaagcaggagatcttaagttagactgcgagagcagaagactgtttatcctgaataaagaggtgaatctgactgcaaaagaatttgatctcttagagcttttagtcaataatccgaataaagtctacagcagggaaaatctgttgaatcttgtctggggttatgagtatccgggcgatgtcagaacggtagatgtgcatgtcagacgtttaagagagaagatcgagaagaatccaagtgagccaaagtatgttcataccaaatggggtgtgggatactactattaccagaattagtcagggtgtgaaagaatgtccagatttaaaaatgtcattaatttttttaaaagtctgaaattcagactgatacttttcttaattctttttgggattgttcctggaatcgttttaaaagttggaattgtaaagacttacgaggatcgttctgtatcgatcaggacgagcgagattttaagtcaggcaaagattctggcgaatcagattgtttccaatgattatttgaatcatccaaattcaaccattattaatgcggaattagatcagctttccaatatttatgacggtcgtgtcatggtgatcgataacagctttcacattatcaaagatacttatgatcttgataccaataagacgattatctcggaagaggtgattgaaagctattacggtcaggagattaaaaaatatgacgcggagaaccgctatatcgagctgacagttcctttagtcagaaatatggagcagaccggcaatacagagattttaggcgttatgttggtcagtgtctcaacagacagtagtcatctgaatatggaatatcttgcgcgcaatgcctatgtattgcagctgatctgtgcggtagcggcagtgttccttgcggtgatcttaagcatccagctcgtaaaaccattccataagatgtcaaagtccattgatgagatcaaaacaggatatggcgatgatgcattggcagtggatgattacaccgagacgatcgagatctgcaaaaagtttaatgagatgcttggaagaatgaaagtattggatgattccagacaggaatttgtatcaaatgtgtctcatgagttgaagacaccgctcacatccatgaaggtactggctgattcccttaacagcatggaagatgcaccgattgagctttacaaagagtttatgggcgatattggaaacgagatcgaccgcgagacgaagatcatcaacgatctcttatcgctggtaaaaatggataaatcagcagcagatcttaatgttacgaatatgaacatcaacgaattgctggagcagattttaaagagactgaatccaattgcagaaaaacagaatgtggagcttgtgttagagagtttccgtccggtatcagcagatgtggatgaggtgaagatcacgctggcatttacgaatctgatcgagaatgcaatcaagtataataaaccgggcggctgggtacatgtgacgctgaatgcggatcatcagtatttttatctgaaagttgaggattccggtatcggtattccggaagattccttagagcatatttacgagcgtttttatcgcgtggataagtcccattcaagagagattggcggaaccggtctaggacttgcgattacccgtaatgctgtgctgatgcaccgcggcgcaatcaaagtatttagtacagagggagagggaaccatttttaatgtccgtattcctttgaactatattgcgtagcctgtgtgatatatgacagcagatttttaataatggagcagaagcaatgagaaaaaaaatagtctttcttttgacattcatctgcattttattgctggcgggatgttcgaatggaaaagagacaagtaaatatagcattgaatatctgaacaaggaaaaaaccgggattgtggaggtgccttatgatgcgtctgccacaacgaaggaagcgctgatcgaggaattttttgcagcgttaagttctgatccggataatgtggagtaccggaagccaattccgaatgatgtggaaatcacgaactattctttggacggagcacttcttactatttattttgatgcagattatctgaacatgaaagaggtagaagaagttttgtgcagagcagcagtcgtgcggacaatgacgcagatttccggaatagactgtgtttccttttatgtggatgagaaaccgctgaccgacacgaatggtaaaatgatcggaaccatgtatgcggagagttttgtggaaaatccggaagaacagatcaattccattcagaatacgaatctgactttgtatttttccaatcaggcaggagacggacttgtaaaagagacaaggcgtgtgcattacagcagtaatatttcactggaaaaactgatcatggaacagttacttgaaggaccggaaagcaaggatgccaagtcagcaatcccgtccggaaccaagctgatcagtgtatctttggtggacggtgtatgttatgtcagcttagatgacaactttaagaatcaggattattctgtgaatgaagcgattgttatttattctatcgtagattcgctgtcagagctgtcttctatcagtaaagtgcagatttccgtgaatggggataccagcggtgtttaccgggataattttaaattggcagatatgtatgacaggaatctggattacgttgcaaaaacaacggaaaacgatacagaggttattgaggagacagaaacggaggaacagtaatttttgtttaaacggccattatgtgaaatggcatctggattgattcttggtattttatttatgaaatataaaaaatggtatctggcagcagcggctgccgggatactgttttgcattgcgcagaatttatggcgcaatgtcatctgcagcgaaaaagaaaagaactgtgcagccactacagttacagagtggaaatctggattttggaaagaaaatgtcagaaagtggatgtacctgtcagccagggtgggatgttttctggcattctttttggcaggaatgtttcattatgcggagaatgaagcgtttcgtcagaattatatgacaaaactgtgtgacggaatgagtgcgactgtgcagggaaaacttggcagcaaacaggcgaagaatggacaatattcttattatttagatcagtgttatttattaattgggcaggagattctgccctgtaatcagattcttttttatcagaattccgatgcgtattcgatcggacaaacccttattgtaactggaactgtggaattatggaaaggcgcatccaatgatggtaattttgatgcaaagtccttttatgaatcgaaaaaaattgatttcaaattaaatgatgcagcagtgcaggaagcttatggcgctaaggattcctttggtgaaaaagtctacaggctgcgccggaaattagccggtgtgtacgaagcatgtatgaaagagcaggatgcaggtgtcttatccactatgacacttggtgaaaaaaatcttctggatgcagatgtgaaacagatgtatcagaaggcgggaatctctcatgtgctggcgatttccggcttacatatttctgtaatcggaatggggttatacaggctgcttcggaaggtcaggtattcattctttggcgcaggagtgattgcggaaagtgtgatcgtctgctatgggataatgtcgggattcggtacgtcaactgtccgggcggtgttgatgtttcttgtcctgttatgcggacaatggatcgggagaagttatgattccctgtcagcgcttggatttgcggcaattgtgattttgtgggataatccctatctgctctggtatgcaggattcctgctttcgtttgcggctgtgcttggaattgctgtggcagggcagactcttcttaagattcaaaaaccattctttcagtttacagagaacttcctggtcagttttgcaatccagttgagtacggtaccgcttacggcttattttttctatgaagtaccggtgtggtctatgtttattaatttttttatattgccagtaattggaatcttgctgtttcttggtctgactggtggttttctgggattggtttcttttcctgctgcaaagacggttttagtgccatgtcattggattctggctttttatgaaaaagtatgcaggttaagcaccagacttcccggggcaacctggatcactggaaagccggactggaaaaaattggttttttattatgcgacagtgtgcgtgatactttttgtaatgaaacagttgaaacggagaacagggtttgtttttacagggagtattttgctgcttctggtgctttataatccggtgaaagggtttgaactggatgttctcgatgtggggcagggagacggtatttatctgcataccaaagatggaacgaacctcttttttgacggcggaagcactgatgtgagcaaggttggaacatatcggatgctgccatttttaaaatcaaagggtgttggaaaaatcgattactggatcgtttcacacacggatgcggatcatatttccggtctgaaagaagtgttagaggcagggtatgagattgaccatatcgttgtttcagcctatatattggaggatgaagcataccagtcactgacagatacggcagagacatacggaacagaaattcttgacatggactatggtgaggtgcttacggacggagaggcagagcttcgctgtattttcccggataaaacttataaaagcgaggataagaatgctctgtcacttgtacttttgtatgaggagaatggtttttcaggcatttttacaggggatatcagcagtgcagaggaagcatatcttataaagcagggaagaattaaggatgtggacttttataaggcggcgcatcatggctcgaaatactcgaacagtctggagtttttactggaactttcgcccgagatcacaacaatctcctgtggcgagaacaaccgttacggacacccgggggaggaagcacttgcccatatcaggcaaagcaaaagtgcagtttatgagacaatggaaagcgggcgtatccgtatccgtgtggagaaaggacgactggtggtggatgaattccggtgagaaaaggggatattttcaggaagaatatgcattgatgtgttagaaaaatttcttgaaggaagcgttattgttttatataatgaattggggttttgttaatttttcacaacattcataacctaaatttgaattttacaaaagccaatttatataaaggagagcctaaaaatgctggtatgcgattatatagtagaacagatcgacggtgattatgcacatttgagaagaatagatgagccggatggcgagttgaaattagtagcaagagcactgcttccaatggagatcacagagggaagcagattacattatgaactgatgcagtatactttgattggataacgagaatgaaaacgattgatgaagatattaagagcggacaatttaaaaaaatatatctgctgtatggcgacgaggcttatctgaaaaagcagtataaggacaaactgaaaaatgcattggtacagccggatgacactatgaattttacggcgtatgagggaaaagacacgaatccgaaagaagtgatcgacctttcggaaacacttcctttttttgcagaccggagagtgattctgattgaaaacagtggattctttaaaggaagctgtgaggaactggcagagtacatggcgcaggttccggatacaacattgtttcttttcgtggaagaagaagtcgacaagcgttctaaactttataaggcagtgaaaaatgccggaaaaatcgtggagtttacgacacagaccgaagaacttctgacgcgctggattttagcaagactgaaaaaagaaggcaagaatatcacaggctccgtcatgcagctgtttctgagcaagacgggaaacgatatggggaatattgaccgggaattagaaaagctgatctgttactgcatggataagaatgtgatcgaggcggctgatgtggaggctgtgacgacagagcagaccacgaacaaaatttttgatatggtaaatgcaatcgcagagcacaatcagaaaaaagcactggatctgtattatgatctgctgacgttaaaagagccttccatgcgaatcatgtttttgatctccagacaatttcagattctcttgaatatcaaggatatggctggaaaaggttttgataataatacgatggcgcagaaagcaggaatcccgccatttgcagtacgaagaaatgtaacgcaggcgaaaggctttacgatgcagcagttaaaacaggcgatccgggatggagttgattttgaggaagcagtcaagactgggcgtatgaatgaccagatggcagtagaattatttttgatgaaatacagtaaataacagagcgttcgctttgcggacatttctgttatcagaaataaaaaatcaccagtatgacggtactggtgatctttttgaattcgcgaattttaatttatcttctattaagctaatgtgttaacaagttttgttaaacgagaaacttttctagcagaattgtttttgtgataaacacccttagaagcagcgctttcgatagtagaaattgcaactgttaatgcagcttttgcagcttctttatcgtttgcagcaacagcagcctcaacttttttggttactgttttaacttcggatctgatagatttgtttctagcagcttttgtttcagttactaaaattctcttctttgcagatttaatgttagccaatctgtacacctccaatttttttatgattgtaattgttcatgattgttacattaaagccggacacggacagttcaatgtaaacatactagagtagtataggacatttctataaggctgtcaatatataaaatgacatttttttcaaaaaatacggataaatttaaaatgtcagggacatactaattgaaatcagtggacgaaaacgatacgccacaagagagaaaagaggagaaacgcatatgtaccagatcaggacagacctagcattagagacacaggaaaaaatgcaggaagataaggtggaactgaaaggagtccgtttttcggaggaacaggtcaataaaaatctgacgatcagcaccgtagtgatcgaaacagagaacggtgcaaaagccatggaaaaaccaaagggaacatacattacgatcgaggcgtcgaatatggacgaggaggacgaggattatcacagagaaatctcagagcagcttgcgaaggtgttaaaacagcttatcaatgtaaaaaaagaggatgtatctgttttgatcgtagggcttggcaaccgggcagtcacgcctgatgcacttggcccgagagtggtagataatctatacattacgaggcacattatcaatgaatatggaaaatatgcctttgggaaggagcatgtcaaccgtgtgagcagtattgtaccgggagtgatggcgcagacagggatggaatccatggagattgtaaacggtattgtaaaagagacaaaaccggatgttgtgatcgcaatcgatgcgcttgctgcaagaaatacgaagcggttaaaccgcacaattcaggtaacagataccggaatcaatccgggaagcggggttggcaatcacagacatggacttaatgaaaaaagcatcggagtcccggtcatcgcgattggagtgccaacggtcgtggatgccgcaaccattgtcaatgacactatgtttaatcttatcacagccatgaatgagagcagtgaactgcagacacttggaaatacattaggagaattaaacgagacggaaaagtatgaactgatccgggaactgttagcaccgaacctgaacactatgtttgtgacacccaaagatattgatgaatcggtaaaacgtcttagttttacaatttcagaggggttaaacattgcgttgatcgacagcaacatttttgcataatgaatggaaactggcataagttgtattatgtattttcatggatatcgaaaaagaagattaaaaaataaatgtaaaaaatatatgactgcgatattgattgctgtggcactttttactttttttgtgcagcggaaggaactttggagtattgggcaaaaagcagcagttaaaatggcgggagcgcaagtgatgaatgtgttagcacccggtcttggctatgagacggatgaagacagcaggcacattcttgcaaaagcagaaaaaattctgttcccgattacggaatatacgacaaagatgcagtcctatgagacggatgcagagagtactttgtcttatgagatgatccttgcgatggaggcgcttgacgaaaactatgtggacgagaacggacaggttgtattgaaaaacaatgtggcagaggaagcacaggtgtcaggtgattcacagaatataggagcagcgcaggtgccagatatttctcaagatgaggaaggggtgcagaacccagaacaaccgcaggatgcagatcagtcacaggatttcgcacaggcaggagaaaacggtaattcagcagcagaaaccaccctcacagtcgcccctccggcggttgcaacacagaaagcggtcgagtactctctggataaattaaacgattttgattatctggtgcagaatttttatcaggttgacagtactacaactgtaaaaagcgatcagttaaacgtggaagcactcacaggaaaaaatatgaagattgcgcatgatgcaggcactccccagattttaatttatcatacacattctcttgaggggtacgcagattccattccgggagaccgctcgacgacagttgtgggggtaggagattatctgacggaactgctgacacagcaatatggatataatgtgattcatgataccggggaatatgatactgtcagagataaggcttactcgaaagccgcaccggcaattgaacagattttagcagataatccaagtattgatgtggtgatcgatctgcacagggacggcgtgggagagaatacaagacttgtcacgaatgtcaatggaaccgatatggcaaaagtgatgttttttaatggattaagcaggacaacaaaactcggtgatatttcatatctgtataacccatacatagcggataatctggcattttcgtttcaaatgcagcttaccgcagcagagtactatccgggatttactagaaaaatctacctcaagggctaccgctttaatatgcactattgcccgaaaacactgctggtggaagtgggagcccagacgaacacggttcaggaggcaaaaaatgcaatggttccgcttgcggacattctgaataaagtgctttcggagtgacagttgtacatatcagaaaacgtaatgttactaaaatgaggtacgagtgaacagtaacaacgtaattaaatgaaaaatataaaacttttgaattttaatgcttttttttgggagatatgataagatataaaaaagcagtttttctatattacctgcacggtcgttgtatttgatacggtctgacatggactttttatagtattggcagctatgggtatagttgttcacagcgataagggcgtgcagtgttcacaaatacttttaattctatcaatattccctgaaaatcttgcttttgaacacccattgtaatataaagcaggattgtaatcaggaagaagatggtttacggcatgattttcagtttgagaatggaactggaacggcagaaaaatgtacttatgtatccatcctgctttataagttttttatcaaggaggaaaagatatgagtggaaacagagagtacaaaagtgatgtgttctgcatgctgatgcaggacaaaaggagagcactcgaactttacaatgtgatgaatggatcttcctatgatgatccggatgctgttgaaatgaaaacattagacggcggtatctcattgtcggtcaggaatgatgcggcgtttgttgtggatgcaaggctcagtatttatgaacatgagtcaactgtgtgtccgaatatgccggttcgaagccttatctactttacagcaatactttccgagtatttaaactgcagggatgatggaagcaaaatccataagaatatatatggacgaagacttgtccgaataccgacaccacagtttgtggtcttttataatggcgaagaaaaacagccagagatacaggaattaagactttcagatgcatttgaaaaacctatggatgatccgaaactggaattgaaatgtatggtttataacatcaatacaggaaagaataaggaaatcatggatcaatgtcagtggttaaacgaatacatgatttttgtaaataaagtcagggaatatcatcatgaacatacggaacaggaattattatctgatatcgaaaaagcgatagattattgtattgataataatattttacgggattttcttaaaaagcgcagaagtgaggtggtaaagaatatgcagcttgattatacgtttgaacgtcagattgaacttgagcgtgcagatgcaattgaagaaggccgagaagaaggtcgtgaagaaggccgaagagaaggtcgtgaagaaggtcgaagagaaggcagagcggaaggccaagaagaaggtagaaaagaaggcagaaaagaaggcagagagcaaggtcgcaaagaaggtcgcgcacgtgaaatttatcagtctgtttcggaaggtgattattcaatgcagcgcggagcacagaaactttctatgacagttgatgaatttaagcaggaaatgataaaagccggatacagaataatggaagtaccggttcagtgagcaattttggaatcattgaaaagggttatttcaaactcttttcaatgattcatttgctgtttataagtgcaacttatatttttccatccaataattgatctggatgaaataagcaagcagttgaggaccagccataagctgcccgaaccacggtttcccgtactctgtcggagcttttagaaaagtatcaagttttcttgaatcaatgaaatctttgatcggtgcatccggctgggtgagaatgtgtttcatttcttcaatcagaagtttttcatagccgggatgataagttttcggataagggctctttttccggtgtaaaagttcctgtggaagcagatctttacatgcgtcacggagcagcgctttttcaacaccattctggtacttcatttcccatggaacgttaaagacatattcgatgatgcggtggtctgcgaatggaacacgcgcctcaagcccggaatacatactggtacgatccatgcggtcgagaagtgtctgcataaaccatttgatgttcagataagcgatattataacgttttcgttcaatatcggtttcgtctggaagatgaggagccttgcgcagggaagtctggtaacagtcgtaggaataggcagacagatccagatcttttataaacgagtcttttaagaataaggtccgcacagacatatcagcagaccatggaaaaccgtctctggataacagatcttcccgataaaaccaaggataaccgccgaaaatctcatcagcacattccccggtcaaagctactttattatgttgctttacaagagagcagaagtagaggagagaggagtccacatccgtcatgcccggaaaatcttttgcatcgaccgcatccttgagtgctgaaaaaagaagcttttcatcacattcgagataggtgtggttcgtgtgataatggtctagcataattttgacataaggaagatcgcgctccggctgaaaggcgttggatttaaaatatagatcattatccttaaaatcaaatgagaacgtatttaatgtttctccgcgttcactcagataacggcaggcaatggcagtgacaatgctcgaatcaatgccgccggataaaaaagtacataccggaacatctgacaccatttgtctggtgacagagtcgcggatgaggaaggagacggtttccacagttttttcataagaatctgtgtgcggagtacgaaaaagatcccaataggtacgatcggatacggtgtcatcgcaaaagatgagataatgtccgggaagtacttcatttacatgtttgaaaattccgttgcccggggtacgggcaggaccaatggaaagaatctcgcgcatgccttcaaacgaaagctccggtgtaaaaccaggaaaacaaaaaagagcctttggctcggaggcaaatataagctgtccggacaaaaaagcgtaaaaaagaggcttgattccaacacggtcacggtacaaaagtaatttttttgcgttgtcatcccagattgcaaaggcaaaaatgccattcagtttctttacaaaatcgggtccgtactgcatataagcgtaaaggatgacttcggtatcggaagtggttgaaaaatgatagccgtatgtcttaagatcgcgcgcaagttcctctgtattatataattctccattgtatacaatcgcatattcgttcccgtctttttgccggagaatcggctgttttccggtgacaatatctcggatactcaggcgggcatgggaaagaccagccatgtctgacagataaatcccggcttcatcatttccccgatgtgcaagacattcatgcatggaggtcaatacacaactccatttttcttttttttgttgataattttctgatgcattaaaaaaacctgcaattccacacatatattttttcctacattctgaacacattctattttgatttattttatgctaagtgtgtaaattcatgcatatgattacaagacttgtagattacgcaaatcaggaattgcgcaattacccggaaaggaaccttgcatgaatgaaaatagcggaaaaatagaaaacatcctaaaccttgcattggatgccaccaatgaggaacgcgaaaaatcattaaatctggatgtcggatacgatgtcaccgaaaatagctgggaagttatagtaaaatttttcggtacgacagaggaattaagagaaaaactgtcggaacggttcccggaagaacaggcgcagatcgggatctataatcttacaaacgagtacgctatcttaagaataccacagccactggtggaacttgttgcagccatgccggagatcgaatacatggaaaaaccaaaacgtctgttttttgcagtggaaaatggaaagcggagttcctgtatcaatccgctgcagaccggacaaaatacagattctgcgagcaatctgaccggaaaagaggtgcttgtggcggtcatagattccgggattgattatgcacatccggattttcgaaacagtgacggaacgacgcggatcgctgttttgtgggatcagacacttggaagcgtttatgagcgagagatgatcaatcttgcgttgcagcaggagagcgagcaggaacgttatgcaatctgtcctagcagggacctttccgggcatggaacccatgtggcaggcattgcagcaggaaatgggagagcttcgggcagcagataccgcggcgttgcatacgagagtgaattgattgtggtaaaacttggcgttccgggggaaacttccttcccaaaaacaaccgagcttatgagtgctgtggatttttgcattgcaagggcgaggcagtacggaaaaccgattgcattgaatctgagttttggaaataactatggctctcattccggaacttccctgattgaaacgtatctcgacgatatggcgaattactggaaaacatctatcgtgatcgggagtggaaatgagggaagcacagccgtccatacagcaggacagatgaccgcggataatatgcaggaggttgagattgctgtcagtgcatacgagacatcccttaatctgcagatctggaaaaattatgtggacgagatcacagtgtcggtcattgccccgggaggaactgtcgtcggaccattgcagcaggtgcagggaacacagagatttcggttagggaatacaaaccttcttgtgtattatggtgaaccaagtccctataatccatatcaggagatttacattgacttcattccggcagaaacctatcttgaggaaggtatctggaaaatcaggctgacgccgatcaccattacggatggaaaatttgacatgtggcttccggcaggaaatgtgttaaacagtggaacaggttttttgaatccggtggaggaaacaacacttacaatcccttccacggctgcaaaggtaatcacagtcggagcctatgatgcaaggtttgaccaggcagcatttttttccggcaggggatatacgagggcgaccaatcaggtaaagccggatcttgttgcaccaggggttgagattatgtcgtgtgcgcccggcggcggatatcaggtgcgcaccgggacatcaatggcgacaccatttgtgaccggaagtgcagcacttttgatgcaatggggaatcgtggatggaaatgatgcctatctttatggggaaaaaatgaaggcttacttgatccgtggagcccgaaaacttcctggattttcccgttatccgaaccctgttttgggctggggagcactgtgtgcagcagacagtattccataaaaatgttaaaaaaacacataaaaataaaaaagtttacagatatataacgttttgtggtatactgtactaaatatagtggagacagaggtataggggtaccgatagtaggatcatcacgatgataaggataaaattatagcaatagtgtgaggaacagaagatgacgaattttggtgagcattataatgaggaactggcgcagcaggagaaagtagtcaacaagcggactttatgggaaattgtcggagcatttatcgttttaactgcgatatgggggctggcattcgggcaattcccgatggtgaatgcgattgtgttcagtataacatatggaatttccgcactcttttttattgcagcgttactcatgttttttaaaatgaatctgtcagatgagcgtgtgaaaaacttttttgtagtcacgatatgcgtaatctcggcggcaatgaacctgatattcagttaccatatggtacttttgtatgtactgccgatgatcgcagcaatacagtataaggataaatcagttctgtggatgtcgtatgcactcgaagtttttctgatgccactcagcatgatcgctgggttttactatggaatctgtgatctgaacctgcttttacagggaaatcatacgaaatcatggtatcttttcaatatggtggatggctttgcacagattccaatgaataaaataccggttgctgttattattgtatacagagttataccacagcttctcgttttactggcatttacgatcattacacaatataccattggcaatatgcaggaggaggcatacaagatcgcagagcttacctaccgcaaggaagtggattcagctacaaggctttataataagaataaatatgaggatatgctttccaattactatacaatggtggaccgggtggcagttattctgtgggatatcaataatttaaaagaaatcaacgaccgtatgggacatggcatgggagacaaattgatcgagacattgtctggtgcaatctatgtgcagacggataaacggaaaaaagcttatcgtatcggtggcgatgaatttgttatgctcatcgagaatccggaagatcaggaggcagaacagatcatccagagtgtcaaagataagctggcaagacacagagaggaaggcggacttcgcgtttcgagtgcagttggtactgcggaaggcaatggaatagacattttaaaagtgatccatgatgcagacgaacggatgtatgcggacaagaaacgcggaaaggagagcagggaatatgctatgttttatagtgaatgagcattccagaagcggaaaaggtgcggcaatctggaaagaggcagaagctgttttgaaggataagaacattccatatgaggcatatgtcacagagtacgaggggcatgcatgtactcttgcgcatgagatctgtgaaagaccagaggatgacatccggctcgtcgttgtaggtggggacggaacggctaacgaagtgatcaatggcatgacacattttgaaaaagtacgttttggcgtgatcccgacaggctcaggaaatgatcttgcaagaggacttggaattacaggaagtcctgcagatgtaatggaacatattttaaactgcaaagaagattatgtgatggatcttggcgaagtaagctggaacggcggtgagaagccaagactgtttgcaatcagtgcaggtgcaggcttagatgcgttagtctgcaaaaaagcattaaaatccaaagtgaaagatacgttgaataaaattcatcttggaaaacttacttatctgtttttgacggtgcagtctctttttagcatgcagacgacagatgccggagcagtttttgacggaaaaggacagcagaaccggaaaaaaatgatttttgctgctgcaatgaatttccgggcagagggtggcggcgtgccgatggcaccgaaggctgatgcgcaggacggaaaattatctgtgtgtatggcatgggggattccaaaatggcgtacctttttatgtctgccattgcttgtgacagccaaacatttacgaatcagagggtttgaagtgacggactgcagagagtatcgcctgaaattgaaaacacctatggtgctgcatgcagacggagagtattgtggggatgtgaccgagatgcattttaaatgtctgccgcgaaaacttcatgtcatgtggtaaaagcggcatgatgtaatttcaagtggcagctcagaagatactgaataattaagaataaagtaaaagttcccttcatagaatgtgataacatatggagggaatttttttatggacaattatagcggaaataaagagtataacatttacagggatattaaaaaccggacgaatggagaaatctatttaggaatcgtcggtccggtgcggacgggaaaatcaaccttcatcaaacgttttatggagctgatggtgcttccgtttatggaggaagaggcgcagaaagtaagagctatggatgaacttccacaggcggcagccggaaaaaccattatgacaactgaaccaaaatttatcccacagcaggcggcagaaatcagcctctctgatctgaaaacgggagaggagccactcagactgcaggtgcgactgatcgattgtgtcggttttctggcagacggtgcggtgggatatatggaaggaaacggaagcagaatggtaaaaaccccgtggtcggatcaggaaattccatttgcagaggccgcgtctatcgggacagaaaaagttatcaaagatcatgcaacaatcgggatcgttgtcacaacggacggcacgatcggagagctgacaagggaaaattacataagtgcagaggaaaagacgattcaggaactgaaagcaatcggaaaaccatttgtgattcttctaaattctgtaagaccatatgcgcaggaaacggtaaaacttgcctctctcatggaagaaaaatatcagacaacagttgtgccggtaaactgtgagcagctgcgcagggaagatattttaaaaatcttagaatgtgtgctgtatgaatttccgattgagcgggtggaattttttattccaaaatggacggagatgcttgcagcagatcatccggtcaaaagcgaaatcatcacgcaggcatccgatattttaagtcatatggagcgcactaaggatgtttatcagcagtcattagaaccgggggaatgcatctcaaaaattaaaattgatgagatggatctttcctgtggctgtgtgaaaatccagatggaagtggcagaaccatattattatgaaaatatgagtgcacttgcaggtgttccaatctctggcgaatatgaactcatctcgctggttcgtgaaatggcggcgagaaaagaatcttatgagaaggtggctggtgcttttgaggaagtgcagatgaaaggctatggtgtcgtgaatccggatctgaaagatattgagttatcggagccggaactgattcatcatgggaataaattcggagtaaaaatcaaggcagtttccccgtccattcatatgatccgtgccaatatcgagacagagatcgcaccaatcgtcggtagtgaagaacaggcaaatgatctgatccgttatataagagagggacagcagagcgaaaatggtgtctgggaaaccaatatttttggaaaatccattggagaattaatggaggacggaatccggaataaaattgccaaaatggatgatgaatgtcagctcaaactgcaggatacgatgcagaagatcgtaaatgacaataatggtggaatggtttgcattatcctgtgagatttgataaaatataaagataaaacagtgtctggatattacaaaattcaaagaaaaataaattgtgaaaaatcaacggaaacgggttttgaatgtttttgctgatttttcacaatcagagaacaggtaaataagagttttgctataaacagtatcataagtgaggtagtgtgatgaatattcgtttttatcatgcaaagatactattgaccaaaaaagatcacacctttgaagtgacagagggagaactctgggtaagaggagatgcgatctgctatatcggggatggaacggatgtcgcatcggtctgtggggaagatgatgtgattctctgggagcgtgagattgatgtaaaaggaaatctattgattccgggatttaaaaatgcacatacacacacgccgatgacatttctgcgttcttttgcggatgatcttcctttgcaggaatggctgcagcaaaaagtatttccaaacgaagaaaaactgaaaggcgaagatacttactatcttgcaatccttgggatcatggaatacctgacaagcggcattacatcgaattttgatatgtatattatgcagaagtatcatatcaaagcttatgtggataccggttttcgaacggtctttacaagtggactgaataattttacagacagtctggaagtactcgaagaaaattatctgaagatcaatgcaatgagtgacctgacttcctatgtaccgggctttcatgcagagtacaccacgtcaaaaaccttgttagaaggtgttgcaaagattgcggacaagtatcatgcaccggtatggacgcacaattcggagacggaacgtgaagtggcagagtgtaaagagcgctggggaatgacacccatgcagtttacagagagccttggactttatgagcatggcggcggtggctatcactgtgtatggttagatgaaaaagatattgagattttgaaaaaacatcatatgtcggttgtgacaaatccagcatcaaatgtgaagcttgcgtccggcatctgtccgacggaaaggcttttaaaagaaggcatcaatctggcaatcggcacagacggaccggcaagcaacaattgtctggatatgttccgggagatgtttcttgtcacagggcttgcaaagctaagggaaaaggatgcttcctgtgtgccggcagaagaagtgctttatatggcaactgccggaggggcttatgccatgggactgtctgagtgtgacagccttgcggttggaaaaaaggcggatcttgtcatgatcgatttaaaacagccgaatatgcagccggagaatcatctggtgaaaaatctggtatacagtggcagtaagcagaacgtgaagctgaccatggtaaatggaaagatactttacgaggacggaacttttcatattgggtttgatccggcagagatttatacaaaggcaaatgagataattggaaggatgaagtaatgcaggtaatttttatacatcatagctgctttttggtggaagtagatgaaaaagtattgatttttgactggtttgcaggagaccgtgtcaatggttttacattccacggacagatcccggaatatgagccggatacgccgatttatgtgtttgcaagccataagcacagagaccactttgatatggacgtgctccactggacggagcgttacagtaacatacattatattttttcaaaggactgtaaaatgacaccgcattttctggaaaaacatggatttgatctctccattcaggatcggatcacatatgtgagtgcgtgtgaaaaatatgaggtggatgatcttgagattgagacacttcgatcaacggatgcgggagttgctttttatgtgaagacaaacggagcaagcttttatcatgcgggagacctcaacaactggaggtgggacggagccggagaattagtcaacggaatcatggatgtcaattacaagaatcaggtgaaaaagctggcgaagaaagacatcaatctggcatttgtgccatttgatccaaaactgggtgagtatcagtcactcggaatggaatatattctggaacacacaaatgcggaatatgtgttcccgatgcatatgtggcaggattattccgggatacagccttttatcaggagactgagcaatcaggcgatggcggaccggatcgtgccaatcacacatgaaaatcaggtatttgaaattctggaagaatagatgcggcttttagaaaaagacacggctttttgaataaaagacgttggataccttgacgataaagaacgaagtgagctataatatttaaattgtgagccggcttacatttttgcagtgcataagtgtcagccatagcagaaaggcaggtagaagaaatggcatttttaggatcatttttacagtatgcgatcattatggtgattttggcagcaattgcgctggcgggattttttgctggtaagaaattacgggcaaacaaagacgcgaaggcagcagcagaagctgaggcagcagtgacggcagaacaggataataaataaaacgccacaggcggatattttatttaaaaataaaggtatggaaacaggatattccgtacaaaagattttggaggaacttagtcgtgaagaagttttacggtgaaaacgaattacgtagaatgtaccttgatttttttgagagcaagggacatcttaaaatgaacagcttttcattggtaccacacaatgataacagcttattactgatcaatgcaggtatggcaccattaaagccatattttacaggacaggagatcccacctcgcagaagagtgacaacctgccagaaatgtatccgtaccggtgatatcgagaacgttggtaagacagcaagacatcttacattctttgagatgcttggtaacttctctttcggagattattttaagcatgaagcgatcgcatggtcctgggagtttctgaccaaggttttgggattagaggaagacagactttatccttctatctatggagaagatgatgaagcatttgatatctggacaaaagaagttggtgttccggcagagagaatcacaagattttaccgtgatcctgagacgggagaatgtgataacttctgggagcatggtgctggcccttgtggtccatgttcagagatctattatgatcgtggagaaaaatacggctgcggtaaaccggactgtaaagtgggatgtgactgtgatcgttttatggaagtatggaataacgtatttacccagtttgagggagacggaaaaggtggttacaccgaactttcccagaagaatatcgatactggtatgggattagagagacttgcagttgtcatgcaggatgtagattccgtatttgatattgatactatgaaagcaatccgtgacagagtatgtgaactgtccggcaaaaaatatgaagtggatgcaatggatgatgtatctattcgtctgatcacagatcatatccgttcttcaacatttatggtctctgacggtatcatgccttccaacgaaggacgcggttatgtactccgccgtatcatccgtcgtgcagcacgtcatggaagaatgcttggaatcaatggaattttcatggcagagcttgcaaaaacggttattaacgagagtaaagacggttatccagagttagaggagaagaaagatttcatcttaaaggtactcgcacaggaagaagagaagtttacaaagacgatcgatcagggacttgcaatcttagaggatatggaaaaagagatgatcgcatccggttctaaagtgttatccggtgacaatgcgttcaagctttatgatacttatggattcccgatggatctgacttctgagatcttagaggaaaaaggcttcacgattgatgaagacggcttcaaaaaggctatggaagtgcagaggacaacagcaagaaagaatcgtaagactacaaactatatgggagcagatgcgactgtttatgatgagatcgatccttccgtcacaacagagtttgtcggatatgataaattagagacagcgtctactgttactgtacttacttctgagacagagatcgtggaagcattatcagatggtgagatcggaacaatcatcgtggaggagacaccattctatgctaccatgggtggacagcagggagacaaaggtgtgatctacactgctgacggtactttcaaagtggaagataccattaagttattaggtggaaaagtcggacatgtcggtaagatgacaagtggaatgatcaagtccggtgataaagttaccttatctgttgacgctgatcttcgtggcaggatatgtaagaatcattctgcaacacacttattacagaaagcactccgtgaagtattaggcactcacgttgagcaggcaggatcttatcaggatgctgagagaacacgttttgacttcagccatttccaggcaatgacagcagaggagatcgcaaaagttgagaagatcgtcaatgacgagattgcagcagacttagaagtccgcaccgatatcatgacggtagaggaagccaaaaagacaggtgccatggcattattcggtgagaaatatggtgagaaagtacgtgtcgtatccatgggagaattctcaaaagagttctgcggtggtactcatgtaaaacatacaggtgagatcacagcattcaagattatttctgagagtggtgtagcggctggtgtacgtcgtatcgaagctttaacaggcgataatgtatttgcttattacaagaatatcgaagctgagttagaaaaagcagcaaaagcagcaaaggcaactccagctacattagtagagaagatcgagcatatgatggctgagatcaaagcgttaaatgctgaaaatgaatcgttaaagagcaaggctgcaaaagaagcactcggagatgttatggatcaggtagtagaagtgaaaggtgttaaacttcttgccacaagtgttgcaggcgttgacatgaatggtttacgtgatcttggcgaccagctcaaaggaaaactcggagagggcgttgtagtgcttgcttctgaggcagacggcaaagtaaatcttgttgctatggctacagaggaggcaatgaagaaaggcgctcatgcaggaaacctcatcaaagcgatcgcaggaaaagttggcggtggcggcggtggacgtccaaatatggcacaggctggtggtaagaatccggctggaatcccggatgcggtagccgaggcaaaggcagcgctggaaactcagattaaataataatttgatgaaaaaaatagaattgtctgaatttttctaaatataagaaaaactattgacgtgtacattttttatgctataataacctatagtgcaatgaaatttacccaaacagttgaatatgcacaatacgcaactggagggaggttaggtgtgagataatgtctagtgtaatagtaaaagagaacgagactttagatagcgctttacgtagatttaagagaaactgtgctaaagcaggtatccagcaggagattcgtaaaagagaacattacgagaaaccaagcgtaagacgtaagaaaaaatctgaagcagcaagaaaaagaaaatacaattaatgtatgtaaaaggagctatcgtgtatgcggtagcttctttttttagaaatttaaagtcagtttgccagaatcgttttttttgttggatcgttttacttaaagtttacaattagaaaacaaaaaaaatacaattaatatcataaatatcttgacactgaaatatgtgtatgatagactttttttcgtgtgaaaaataaaaatcgttttttcatgcaaatgtatgaccactcagattactgaggcagcctaacggacaggcgggtcggttgccggtgtggtgaggagaccacgttattgattgagttagaagctcaaattttataagttgattactttataatcagtgcgtatgcacatcatcttgtgaaacggtcaataagagtgacatatatttgcaaaggattctttgaaaaacgatatttgggatcacatcaagagtaaaaaggattccaatatggagaacgaaggtcaacagagatgattgcgcaggcagttgtctctttttttattacataggaaattacttcctatgtaataaaaacgctccgcgaggatgcaacgtgatcgaaaacatcatttctattacataaaatgtgaaaatgattatcttaaaaattataaattgcaatggagaaagttatgaacagagaagatcagaaaagagctcctatttatgaagcactggaaaaattcaggaagcagcgtgtcgtaccatttgatgtgccggggcataagcgggggcgtggcaatcctgaattagtggaattattaggggaaaaatgtgtggggatcgatgtgaattccatgaaaccactcgataatctctgccacccgatttctgttatacgggatgcagaggaacttgcagcggatgcgtttcatgcggaacatgcatttttaatggttggaggaacgacttcggctgtgcagagcatgattttatcggtctgtaaaagaggagataaaatcattctgccgcgaaacgtacataaaagtgcgatcaacgcactggtgctttgcggtgcaatcccggtttatgtgaatccggaagtgaatccaaagcttggaatctcgcttggcatggaggtgccgtgtgtggagcaggcaattaaggaaaatccggacgcagttgcagtgcttgtgaacaatccgacttattatggtatctgttcggatatccgttcaatcgtaaagcttgcacatgcgcatggtatgaaagtgctcgcagacgaggctcatggaacacatttatattttgggaaaaatcttccggtttcaggcatggaagccggtgctgatttagcggcaatttccatgcataagtccggtggaagcctgacgcagagctcaatcttgcttgtgaataaaggggtaaatgcagattatgtcagacagatcatcaatctcacacagactacaagcgcatcgtatcttcttctgtcaagccttgatatttcaagaagaaaccttgcgttaagaggtgaggagtcttttgccaaagtgtccgagatggcagagtatgcaagaaatgagatcaacaatatcggtggctattatgcgtatggaaaagatctgatcaatggcacaagcatttatgattatgatgtgacaaagctatctatctacacacttggcatcggacttgcagggatcgaagtgtatgatcttcttcgcgatgaatatgatatccagatcgaatttggggatatctgtaatattttagcctatatttccattggagaccggacacaggatattgagcgtctggtgggggcgctggcagatatcgcaagactgtataaaaaagacagggcaggacttttatccggtgaatatatagcaccgaaagtcatccgttcaccacaggaagctttctatgcggaaaagaaatcccttcagatccgtgagaccagcggctgtatttccggtgaatttgtcatgtgctatccgccgggaatcccaatcctggcaccgggtgagatgatcacagatgaaatcatcgaatatatcatttatgcgaaagaaaaaggctgctccatgcagggaacggaagatccggcagtggaacatctgatggtgctggtgtaagagatgagtgatcccggagaaaacggtggaaaacgggacagggaaggagaagcagaaaaatggaaatgtggttttcggagcttcacacatcgaatgtaaagctctcaatgagaatcgaaaaacaattattcagcggtaacagtgactgccagaggatcgatgttctggaatcagtagaatttggcaagtttctggctttggatggggatattcttttttcggaaaaggatgaattcatttatgacgaaatggtaacgcatgtgccgatggcagtacatccggacgtgcgtcacgtgctgatcatcggtggcggtgatggcggcgttgcaaaagaactgacacagtatgattccatagaaaagattgatgttgtggaaccggatgagatgttagtggaagtctgccgggagcatttcccggagcttgcatgtggtctggatgatccacgtgtgaatgtgtattatcaggatggacttcgttttctgagaaacaaaacagaggagtatgatctgatcatcaatgacgcaactgatccatttgggcatacggaaggactttttaccaaggaattttacggaagctgctataaggcgttaaaagaggacggaatcatggtttatcagcatggaagtccattttatgatgaggataaggaagagtgcatgaagatgcaccgaaaggcattccgggcatttccggtaagccgcgtctatcaggcacatattccgacctgttcatccggttactggctttttggatttgcttccaaaaaatatcacccactcaacaatctgcgtgtgaaagagtggaaaaaattacatatcaaaacaagatattatacaacgaatcttcatcgtggagcattcatgcttccaaaatatttagaagacatgctggaggatgaggaagaccggtagaaagaattattggtcaacaataactaggcaattatctaacgaaataaatgcgtgaaaaaggagagaaataaaaatgagcagagtaatgattatcggatgtggaggcgtagcttccgtagcaattgcaaaatgttgccagaacagtgatgttttcactgagattatgatcgcaagcagaacaaaatccaaatgtgatgcaatgaaaaaaaaattacagccaacaaccaaaaccgtcatcacaaccgcacaggtagatgccgacaacacagaggaactgatcgcactgatcaacgaatataagccggatgctgttttaaatgtggcacttccatatcaggatctgacgatcatggatgcctgccttgcaacaggagtagattatattgatactgcaaactacgaggcagagaacacagatgatccggaatggagaaaaatctacgaagagcgctgcgagaaagaaggatttacagcatactttgattattcctggcagtgggcttataagaaaaagtttgaagaagcaggcattacagcaatccttggaagcggatttgatccgggtgtgacaagtgtttattccgcatatgcgttaaaacattattttgatgagattcactacattgatattttagactgcaatggcggtgatcatggttacccatttgcaacaaactttaatcctgagatcaacttaagagaagtatctgcaatgggttcttactgggaagatggccactgggtagaagtagagccaatgtccattaagcgtgaatatgatttccctgaagtcggagaaaaagatatgtatctgcttcatcatgaagagatcgaatcacttgcaaaaaatattccgggaatcaagagaatccgtttcttcatgacattcggacagagctatttaacacatatgaaatgtctggaaaacgttggaatgctttccacaacaccgatcaactttgaaggaaaagagatcgtgccgattcagttcttaaaagcattattgccggatcctgcaagccttggaccaagaacggtaggaaaaacaaacatcggatgtattttcaaaggtgtaaaagacggaaaagaaaagaccatctacatttacaatgtatgcgatcatcaggagtgctacaaagaggttggttctcaggcaatctcctatacaacaggagttcctgcaatgatcggaacgatgatggttgtggaaggtctctggaaaaaacctggcgtattcaacgtagaggaatttgatccggatccatatatggaagcactgaataaatggggacttccttgggtagtctgcgagaatccgcaggaagtagagtaagaaagaggaatgaaaaggcagaatgagaattgaagaattaaaaacaccgtgctatgtcatagatgaaaaacaattgaaaaaaaatctttccattctcaggaaagtggaaaaagataccggatgtaaaatccttcttgcacagaaagccttttcctgcttttacgaatacccgctgatcggacagtatatcagtgggacaactgcaagcggactttatgaagcacgccttggaaaagaggaaatgggaaaagagaaccatgtatttgctccggcgtataaagaagaggatgtgaaggaactggtaaaaatctgcgatcacatggtttttaatgccatttcccagctggaaaaatacaaaactctctgcaaagaaaccagcgtgggaatccgtattaatccggagtgttccacgcagggggatcatgcgatctatgatccatgtgcaaagggttcgcgtcttggtgtgacaattgcacattttaaagagcagtttacggataagatgtatgattatgtggatggattgcattttcacacgctctgtgagcagaatgcggatgatcttgcaaaaaccttagaggcagtagaagaaaaattcggcagttatctttacaaaatgaaatggctgaattttggcggcggacatcatattacaagagcagattatgacatcgaactgttagaaaaatgcattctgcacatgaaggaaaaatatgatcttgacatttatttagaaccgggcgaagcgattgcattgaatgccggatatcttgccacaaccgttatggatgtggtagataacgatatacagacgttgattctggacgcatccgcagcatgccatatgccggatgtgctggaaatgccgtaccgtccgccacttcgcagttcgggaatgccggaggaaaagaaatatacttaccggttatcttcgtatacctgtctggcgggagacatcatcggggattattcttttgatgaagagaaaaaagtggatgacagactgtattttgaagatatggcaatttactccatggtgaaaaacaatacatttaacggaatcccactgccggatattgcagtgatggatgagagtggtgaatgtaaagtgatccgccgtttttcttatgatgattttaaaggaagactgtcatgagaaagtccggccggatggaaaatccatggaaagacaacatggaaaaaggcaggaaaacagaagtatgaagatagaaaacagaactccgcatcaggatggattttatatgccgggggaatttgaaccgcaggatggtgtgatcttaatttggccgaaacgtccgggttcctggccatatgaggcaaaagaagccagaaaagtatttgtagagattgccaataagctggcagagacagaaaaagtatatatgctgacagaaccggaaacggaagcagcggcaagagagctgctgtgtgagaatgtagaaattttaacaattccgacagacgatgcatgggcaagggatgtcggaccaacctttgtgacggatggaaaagaagtccgtggggtcaactggagctttaatgcctggggcggaacctatgatggtctttatcaggactggcaaaaggatgataaggttgcagaagaattttgtaaactgaccggttatgattattatgatgcggctccttttgtgctggaaggcggttccatccattcagacggacagggaacggtgatcgcaacggaagcctgtctgctcagtaagggaagaaatccggaacttacgaaagagcagatcgaagcaaaattgcaggaatatctcggtgcagagaagatcatctggcttccaaacggaatctatcaggatgaaacaaatgaacatgtagacaatgtctgtgcatttataaaaccaggtgaggttgttcttgcatggacagatgacgagagtgatccgcagtacgcactttcagcagaggatcttaaggttcttgaacaggagacagacgccaaaggaaggaagttttgtgtgcataaaatgccaatcccgaagaaaccggtctgcattacggaaaaagagctggcaggttacgtgtttgaagagggcgaggatacaagagaagccggagaacggttagcggcaagctatgtgaatttttatattggaaataaagttgtccttgtgccgcagtttggagacgagcatgatgttctggcaacagatttattgcagaagctattcccggagcgtgagatcgtgccaatctttgcaagggagatcatcatcggcggcggcaatatccactgcatcacgcagcagataccggtacgtggctgacagatttcctattctcacacacattatttcagaggtgtgataacagagtatcagaaacaagtttgattttgaaaaatgaagaaagcgagatagcacagttatgagcagaaaacgtaacgtcacagtagccgcagttcagatgaaatgcagcacaaatgtggaagaaaatatcgcaaaggcagatgcacttgtccgggaagcggcagaaaaaggagcacagatcatccttttgcctgagctttttgaaagaccatatttttgtcaggaacgcagatatgaatactatgaatttgcaaaagaagtgaatgaaaatgatgcggtaaaacatttttctgcactggcaaaggaattgtctgttgtgatcccggtcagcttttatgaaaaggatgtgaaccgcctgttcaatactgttgcagtgatcgatgcagacggaagcaatcttggcatataccgcaagacacatatcccggacgatcactattatcaggaaaaattttactttgttccgggagataccggatttcaagtgtttgatacagcgtatggaaaaattggtgtcggcatctgctgggatcagtggttcccggagacagcaagagccatggcggtcaaaggagcagagctgctcttttacccgaccgcgatcggcagtgaaccaatcttagagtgcgacagcatgccgcactggagaagggcgatgcaggggcatgcagcagccaaccttatgccggtgatcgcagcaaaccgtatcggaacagaagaagtagttccatgtgaggaaaacggcggacagaggtcagcactcacattctatggatcttcttttatcacagatcagaccggagaacttgtggcagaggcagaccgcgagatggaacaggtgatccttgcaacgttcgacttaaatgaaatgcaggagaaccgtctttcatggggaatcttccgggacagaagaccggagtgctacggggatatctgcaaataagcaaaaggacgcatgaaaataccctctttactggacaaaccagtatgagggtattttcatgcgttcttttgcttcttatggatacaatagtggttatactacataaaaaagtacctttggcatcttttagtatccgaattcttcgccaattaaaatgactttaatccttccctgaatgccacttcttcttgtgatcacgacctgattgcagatacagtcaggagagaggcagtcggcacagactccggtgacagcacatggtgtctgcttgttcagacgtacacagttcataggagttgcagttaagtggacacggtcaatggcttctgcaacgtcctttgcagccttgttcattccggcaagaataatgacattttcaggaccatagattaaagcagcgacccggtttccattgccatcgatattgactaattctccatcaattgtcatggcgttggtgctcatgaaatagtagtcagccatcagtgcgtcgtggaatatttttctggaatcttccggcgtcttacagacagcccggtctaaaaactcaatatcggctgaacgcagtgcatctatcatgccggtttcctctagtgtcatggagccgccgtgagccacgactgcaccggatggcaggaaagaaagtgctttctctacggcttcttttgcggtcgggtagtagtatgcttccattcttctttgttcaaaatttttgatcatggtattggcgagtgtttcgtaatattttgcttttggtgtcatacaatacttctcctcttatttacctttttgacttttattataagcagattttatcgttatgcaagcgctattaaaataattgaaagcgatcagattttcttcaaaagtaaagaaatgtgcgaaataaatcatatcacatagaagtcctttttatgggacacatagtataatagaattatactgaaaaagggctagattgaaaaaggctaatcagaagtaaatgggaagggtgcttatgaatattaaaagcgaaaaagagttttatggagaagaattgaaaagagtagctttgagattcaatgcggacatatttgtctggggtgaggaactgatcagtagaaagttgattatttatcctaagaagttaaaagatgtcattggttatgaagaagtaaaggaaaaacttgaaccatgtgggcttgtactgattgatacccgtaagcaggactttttgcattgtacatcgaccatgctagataccatcaatggaaatatgtatatgtcagaagcaggtttcaacagttcatggaggctattgaagaacagtgtaaggaaagggataaggattgcaaatgaaaatgaaggcagtccgattgggaagccagaggaaatcattgtatttgataatttacagagagcaggaagtactccgaccattgtgaatgatatcatcaaatatgaggcgagagagcttacaaaggaagaaaggtatagagatagtcggaaacaaagtctgctggataatccacggatgttatatttctatgaaagcagtggtagatattatcatgatagagattgtcttgaagtaaagcagatagcatctgagcggttcgcagcatcagaagaaataccggataaagagatatgtccgaaatgccaacgtagaatctatatccgaaaagcctgttatccgaacacaaaacagataggagtctgtgacaagatattgagggatcatggcgtatcacttggcaaaataaaacattgtgtaatggaagttggaatgaaatttcatgcgacatctatggaagaacttttggttgaaggtgtggaagatacctggattgtaaagggattatgtaataaaaatctggctctctggcataacaattatgtgaaaacaggatcaacagagagatacataacggaaggcttccacaagcagaaagtggacaataagtcgcttacacagttgttgacatatattgaaaaatattcgttcatcaagcatttggagaaggaacagcagacggcagagtcattggatattccggtaattgataatgacaagcaggagacagcaccagagattaaagagacagaaagagtatctgtagcagatatattcaatagatttataaataaattgaagaagatattcaatatttgaaaaaagatatgtaatattcgcaaatgcaaattgtacaggcagttttcttgtggtaaaataatcctgatagtgattgcacattatacggaggaaaagaggatggcaattagttataacggattatggaagcagttaatcgaccatggaatgaaaaaaggagatttgtgtgccaagactggtcttagttccagtacaatagcaaagatgacaaactgtgagtcggtgaaaatatcagttctggaaaaaatctgcaaagagttggattgtaattttggagatttgattgactatgtaccggatgacaaagaaaggtaaattactttatggaggaaaatgtaaatggctacgagaagtgcaaaaatagatcagaaagcagacctgatatgggcaatagcagataagcttaccggagtatataaaccacatgaatacggagatgttatattaccacttacagtaatcaggcgttttgactgtattctttcagataccaaagatgcagttttacagaaatatgaggaagtaaagaatcttccgatgaaggatgttttacttcgtaaggcagctggatatgatttttataacaccagtaaatatacatttgagagacttatggatgatcctgaccacattgaagagaatttcagagactatctgaatggattctcagcaaatgtgcaggacatcatggagaagtttaagtttgatggtcacatcacaactatggcaaataaaggaattctctatattgttttaaaggaatacacaacagatagaggaaatcttcatccgaatgaaatctctaaccttgaaatgggatatatttttgaggagattatcagaagattttccgagtctcataatgaagatgcaggacagcattacactccaagagaagttattcagttgatggtcaatattctcttttatgatgataatgatattctttctggtaataatgtggcaaagacgatttatgacccagcatgtggaaccggaggcatgctttctgttgcagaggaatatttacatagtctgaatgcttctacagagcttgtatccttcggacaggaaattaacgaccagacattcgcaatctgtaaggcggatatgctgattaagggtaacaatgctgattacattaaggatggcaacacattatcagatgaccagtttgcaggcagtacctttgattatatcctttccaatcctccttttggacgtgagtggaagaatgaaaaggcaaaaatagaggaagaggcaaagcttggcttcggaggaagatttggagcaggacttccggctgcaagcgatggtcagatgctttttcttatgacagcaatatcaaaaatgaaaaatattgataagggtggaagcagaatagcaatcattcataatggttcaccactctttacaggagatgcaggaagtggaccttctgaaatcagaagatatattcttgaaaatgatttacttgaggcaattattgctttgccaaatgatattttctacaacacaggaattgcaacctatatctgggtattgtcaaataaaaaggcaggaacagtcagagatgggaaagtacagcttattaatgccaatgagatgtttgtgaagagaagaaaagcattgggaaataagcgaaatgatatatctgaggaagatatcgcagagattacaaagatatatggtgattttaaagaaagtgaaattagccaaatatatgataacgaggattttggttataccaagattacagtagaaagaccgctccgtgatgaagaaggcaatttggtattaaaaaagggaaagaaacagccggatacgagtcttcgtgatacagaaaatgttccgctgaaagaggatatcaaagagtactttgaaagagaagtattaccttttgcacaggatgcatggatagatacgaaaaagtcaaaggtgggatatgagattccgtttacgagatatttctataagtatgaagctccgagaccatcagcagaaatcatggcagagattatggatttggagacagaactgtctggaagtcttgaggaggtatttgacctatgagagagatgaaagatagtggtattgaatggttgggtatcatacctaagaattggaaagtatttaaagtaaagaatattgcgaagcgaaaatctgataaaaatagaccagacgagcaggtgctatctttatatcgtgagttaggaatagtaataaaatcagaaagagatgacaatcataatgtgacatctgaaaatactgataactatagatatgtagaagaaaatgatattgttgtaaataaaatgaaagcatggcaaggttctattgcagtatcagcatataccggaatcgtgagtccagcctattatgtttataaattgacagatgaatcagtttatccatggttcgttcactatatgctgagatgcaaagcatatttgccagagtatagaagattgtctggtggaataagattgggacaatgggatttaagtgatgaaaattttaaaaacattccgttgcctgttcctgcaacaattgaagaacaaaagcaaatagttgattatttggatgtcaagtgttcaaagattgatgaaattattgaaaagcagcaggcaattattgaaaagttaaaggaatacaaattatcaattattacggaagcagtaacgaagggattgaatcctgatgctgaaatgaaggatagtggaaatatagaaataggaaaaattccttcaataagtagaccgacaaaactaaagcatttgtgtaatacacaaggaagaattggatttaaaggatatacaacaaccgacttggttgatgaaggagaaggtgcatatactttaggagcatcacatttaaataatggaaagatagatttgaccgatcctgtgtttatttcgtgggaaaaatattatgaatctccagaaataatggtaaaacaaaatgatattttgatagtacaacgaggaagtacaataggaaaagtggcaattgttgataaaaattatggtgaagtaacgattaatccctcattagttcttattaacaagattcatattgacagtaaatatttattgtatgcactttcggcaagatatattgcaaattatataaatttgattggaaccacaactgcaattcccatgattagtcaaaaacagattaatgacttggttgtaattgtaccgccagattcaattcaaatttcggttgtaaaatatttagatgagaaatgcagtaaaattgatacaaatattttgaaaaaacaaaaattaattgaaaaactccaagaatataaaaaatccctcatctacgaggttgtcacagggaaaaaggaggtgtagctcatgtctgattttgatgtaaaggagaaacgatttgaggaagatatcgaagactatttggttcatcatggcggatataccaagggcgacccgaagaaatttaatcgggaatctggacttgatgaagatacttttgttgagtttattaagacaagccagcctaagaaatgggacagatatgtgaaaatctatgcagagaattccgagaaacagatcgttgagcgattcaaaagagaagtcaagacaacgaatcttttaaatgtgatgcggcatggatttatggacagaggaatcaagttttatcctattttctggaagccggagacctctttgaatgagactacacagattcagtatgatgcgaatatccttcattgtaccagacagcttcattattctgtacataatgagaacagtattgatattgtgctttttgtaaatggtattccggtggtatctatggagttgaaatgctagtttacaggacaggataccacaaatgcgattaatcagtataagtttgatcgtgccggtaaggatgcaatttttgccttcaaagaaagagtattggtgcatttcgcagtagaccttaccaatgtctatatgacaacaaagcttgagggcgcacacacttatttcctgccattcaatcagggcagtaatggtgcgggaaaagtaggaggcaaaggaaatccggtaaatccagatggatatgatacagcttatctttgggaaagagtactctgcaaagacagtctgatggaaatccttcagaaatatatgcacttgcagcaggagtacgataaaaatggaaatcttgtgaaagagactatgatttttccaagatatcaccagcttgatgtagtcacaaaacttttggaagatgtgaagaagaatggctcaggtaaaagttatctgatccagcacagtgcaggctcaggaaagtccaattcgattgcatggctggcacacagacttaccggactccatgattatgaagataataagattttccagtcagtaatcatcgtaacggataggcgggtgttggacagccagttgcagtctacggtatatcagtttgaccatgtagaaggtgtggttaaaaaagtagataagaattcgggacagcttagagatgcaatcaatgatggtgtaggcattatcatcactacattacagaaattcccggtaatctataaagaggtggattctgcaaacaaaagatttgcgattattattgatgaggcacattcttcacagaccggagacgcagcgaaaaagctaaaaagagcattagctgatacagaagaaattctgaaagagtatgccgagatggaagatgaggacgagagaaatcgtaaggacgatgaggataaactcttagatgaactggcagcacagggtatgcataagaatttatcattctttgcatttacggcaacgccaaaaggaaagacattgcagatgtttggtcagaaggatgcggaaggaatctacagacctttccatatttattctatgagacaggcgatagaagaacatttcatattggatgttttgcagaactatatgacctacaaaatgtactataagattgccaagattattgaggataatccggaatttgatacagcagcaggttcaaaggcaattataaattatgagacactgcatccgcacaatatctctcagaagactgccattatgctggaacattttatgaatgtcaccagacataagattggtggcagggcaaaggctatggttgttacaccatccagacttcatgcagtacgatatgtgcaggaatttaagagacagataaaagaaaaaggactgaatgaccttgaagtattagtcgctttttccggtgaagtgaaagataacgatgatgtatttaccgaagagggaatgaacaaggacaaagagggaaagacaatcaaggagaaggctttaccggaaacattccatacagatgattatggaatccttgttgttgcagaaaaatatcagacaggatttgacgaaccattgcttcacaccatgtttgtggataagaaattgtctggtgtaaaggcagtacagactttatcaagattgaatcgaactacaagaggaaaagtagatacctttgtacttgattttgtcaattcagcagatgatatcaaagcatcttttgagcctttctatgaggaaactgtgctcttggaggaaacagatccaaatgttgtatatgacatgaagaacactttggatgatttcagggtatatcagaaatcagaagtggataaatttgcggatattttctatcagaatgagaatcaatcagctggtgatcttggaaagcttcagggacagttaagaccagcagtagacagatatgaagtgcttgaagttgaaaaacaggatatatttaagtctactctggcaagctttaatcgtgtgtatgcctatattacacaggtatgcaggttatttgacaaggacattcacagattcagtatttattcaaagttcttatacacgatgcttccaaaaggacatggtggagagaagataaatattgatgacaaagtacttcttgaatactataagctggaaaaagactttgaaggtccgatagagcttgacagcacagaaggcggatatacacctatttccggtgattccggtcatagagagcctaagaaagacccgctgacagtaatcattgataagataaacgaaaagtatggcactcattttactgaaatggataaagtacttgttcagatggaaaatgattatgccaatcaggaaaaatggcagagctacgcaaagaacaatgaccgggcaacatttatgctgttatttgaaaaggattttccgaatatggcagcagacagatatgagcagaatgaccagtttttcaaaaaactgtttgatgatcctgatatgatgaagcaggtaatggagactgtaggttctgtattgtatgagagattgaagaagaaataaagtgttgtagttgaggaattgctatggggaaaatagatgtaattgagcaggcagcaaataggcttctgcaacataatgttgcagaggccagaatagtgatagaaacaggatatccattttataagttgtctgcacaagggcgtaattatacagataaagagaagatggcacaatttgtacgggatggatttattgacagatatagtggacagaaacttgtgaatccaggaatattgaaggtactatcttattacatgcctgagacatttccatatcatgctcattggaaaatggaagaatgccataatgcttactgggagtttgtacctactgtagatcacatatatcctgtagcattaggtggggctgattctatggataactgggcgacaacatctatgctgcacaattcaattaagagtaactggacattagaacaacttaattggaaactgtatgatgccggtgattttgataaatatgatggattaacaggactatttactaaattggtggaagcagacaagaaattgttaagtgattcttatattaaacgatggtaccggttgtcagttgctgttgcaagcaaatagaggaggtgctatagatttgcaatttgtatcgaaaaaagaggaagggacatttttactcttatttaacagatttggatatgtattggattttacggataattcattcgatgtatttactactgcgagtattggtgagccaataaaaactaaatatggtctatcgaaaggaaaatcattagttgcgtatctgaatgaagctgatgatatacaaagaacaaagctacttatagatttattccattattatgaggataaaatggaatatgaatataacattgattatgaggatttggaaaattggagtactacatctaggtatgatgaacattatgcaaagatatatgaaaagtgtaaagaaatagtagcacgtttaaaaggtggcacaacagtaattgcaatgacagcagagaacctaaaaaataagttttcaagtgagtacctttcgcaacagattgatttgatggtagaaatgcagaatacgaatccaaccaatgcaatcggaatggcaaaggaattgattgaaagttgttgtaaaacaattcttgaagaaatgcagatatcatattcgaaagatgatgatgtaccgcaattagcagataagacaatgaaagctttaaatctacttccatccaatgtacagcctacagatagaggggcagatgcaattaaagcagttcttggaaatcttagagctattcctacaaaactagcagaaattcgaaatccattcggaagtggtcatggtaagagtgcatcttttcaaggacttgaagttagacatgctaagcttgctgttgggagtagtattacttttgttgattttatctggagtacatatgaaagtcaaaatttagataaattgtagggataaatgtgcagatacactattttcagagatatcattcaaaggagaatgtagatacgtctaatactatgctgatgttatctcgcttatataattataatgcggataaattctttgtaatgttgaatgctctaatactgggacaagatgagaatatggatacaatttgaaaaccgtcaaacatagatattttatagttgagcatttttatccaacagactttaaaaaagcaagtaaaaatccgattcaaaaaagtaaatattttaatctggcagaaatgttcaaaagtaagactttgcctgaaacagaagagatagcatcaatactggatggaaaaacatgggaggagatgaatacataaatgaatgctaaaaaatccgcagattattgcaatctgatagaaaatgtaaaaaacaaatatcgaaaaaatcctatatacacaaagaacctgacacttggctggtgcgatttgcgtcagggagaagatttgtgtcaggaaattaacctatggacatattggcaagggagagattacgccaagaagacaccacatattaagtatatgctgataggtcaggatttcggaccgcctgaaaaggaagagataaagggtacgattgcaaatgtccgtaagatgaatgatggtatagatgtgatgttccatgaaaatgtagatttggaagcaagggattcacagacggataaaaatattgtcggatactttgaactgcttggtaaaaatgaaattgacaagaaaaaatatccagatttgtttttctgcaattgtaatttgggctatcgcagagataagtattctggaaatatgaccagaaagatattggcaaatgatgcagccgaaataaaatcattgattgacattatagagccggaaaacataatctgtctggggcttgatacatccgtggttgtaatacgaactctgattgataaaaagttttcctgtaatagagtatctgaacttataggaactggcgaaccttgtatttatggagaaacacatatataccctgtagcacatccggggtattggggtacaagtacaagaggggaggataatgttattgcagattggaggagaattagaaaatagggaggtgccacaatgccatttaagattgtccgcaacgatataacaaaggtaaaagcagatgtgatcgtaaatactgccaatccaaatccaatatgtgcaagtggcacggatttagcaatatatgaggcagcaggaaaagaaaaacttctcgccgaaagagcgaatatcggcaaaattgcaagaggtgatattgattcttacatagatgctaattatgtcagggaaagtcatagaaaagaatatccggtgcgaagcagaagcaacgcccgcatgagaggattgacagaggaacgagaataaagatccatacaatatattagttgagaacaatcgagtatataaacttggaggatgggaatttcttgatataaccaataagctttttgacaatgaaaagcaggtggactggggaagctatgcataccagtgcacaaaggagcaactggaaaaactgatggaacagactggatgtgaaatagataagatgaatgaactggcatctgagaaaatctagggtattgtgtttgttgaagaggtgtaaatcttttagagaccggagaaattctggtctctttatttcgattaccactgtcaaataaagacaaaatggtttatactttttatcaagtgaaagaagaaagcattaaaagtagatttgatggcaaaattataaaaggaatgatggatatacagttagttacagaacttaaagattcactgcataattacgatggaggtttggcgattgaaagaagagattctagaagaattaaatattaaagaaaatcatgaacgagaatgtaagcttgcagcaggtggacttcctgagagcatatgggagacttactcttcttttgctaatacaaatggtggcacgattctacttggtattagggaatacagagattcttttacagttgaaggactgacagacaagcagattgttaaatatcagaaggatttctggagtactttaaatgacagaaataaggtgtcaaagaatatcttgctgaatcatcatgtcagacctgtgatagtcagggaaaagaaaatactcagaattgatgttcctgcggcagacagacacgataagccggtttatattgggacagatccaatgaaaggcacttataaaagagattatgaaggtgacttcctttgtgccgaagaggcagtccgtgcaatgtttgcagatcagagagatgtgtcaggcgatgtggaggtgctggaagagtttggattagatgtgctgaatcaggatacgataaaaggctatagaattatttttgaacagcttcacagcggacatccttggaatgctttggaaaatgatgagttccttatgaaattaagggcagcatcaaagaataagaatggtacattatctccaacgatagcaggactattattctttggagaggcgtatcatattacggaagttttcccgaattattttctggattatcgtgaggaatgcgatgataaagcagtacgctggttattccggacacattctaacgaaggggattggagcggcaatatatacgactttttctgtaaggtgcgtacaagaatggacgatgatatagcagttccatttgcaaatagacgaaatggatatcgtgtagacagagtggatgtgcatgatgcattggaagaagcattggcaaatgcactggcacatgcaaattattatggcagacgaggaattcttgttgtaaagaaggggaaagaacttagtatttccaatcctggtactatcagggtgacaaaagaagaattttatgctggtggcaatagtgatccacgaaatccgaatatcttaaaaatgtttggttttgtaaatgttggtgagcgtgccggaagtggtgtcgataagattatgactgcatgggcagaacaaaactggaaaaaaccggaatttgatttttcagagcgcagtgacagggtaacattaaagctcgaagttggacaagtggtatatattccgggagctgctgatataagaaacacaactgagagtgatgaagcagagacaataacaactatgtcgaaagttgacaaagtacttgcttatatccggcaaaatggaagtgtttcaatgcaaaaagtaatggaaacctgtaactacagatctagaaccggagcaagaaagttaatagataaaatgataaatgcggatttgatagaaaaaactggagaaggaaacaaaacgatatataaaattaaaaaataatttactggtcactttaaatgatagagtgaccagtaagtggtcacttttgaaataaaatgaccagtaagtgaccagcaagtggtcacttgtgaccgcagagtgttcactataaaaataatcttttggaaaacaatgcaacaacaacatgctgcagggagtgcatccgaaagtggcataaaatgtatccagaaaaggaactaagtcaggtgcagcaggattatcttgtagatgtaattatgacatggattcaaaaagaaatggagagaggttagtgcagatatttgtagatgcagatgcgtgtccggtagtgggcattgtagaagaaattgcagagaaatataatattccaaccacattgctgtgtgacacaaatcatattttgtattctgattacagcgaggtgattgtagtaggtgcaggagcagatgcagtagattataagctgataagcatttgtcataaaggggatgtagtagtaacgcaggattatggcgttgctgcgatggctcttggaaaaggtgcatatgctattcaccaatccggtaagtggtatacgaatgagaacatagatcagatgcttatggagcgacatcttaacaagaaggcaaggcgcagttctcataagaatcatattaggggaccgagaaagcgtacagaagaagatgatgtacgctttgcacagtcctttgaaaaacttatactgatggcaaagtcaaaagaaggtgctcagagtgggactatttaagaaaaagatagttacaaagacgtatgataaagaaaataagaaaccagttatcaaggcgagcatatgtaatggcgagcaggttgcaggctttaaggacattcatacaggtaagatagaagaggttatgctgattaagaaccaggcagaccttgatgcattcaagaaaatgtatggaataaatggagagatagagaaggaatactagggaggtaaatagaaatggcaagtgttgtttgtgaagtgatcaaacacatgatgtataagattgatattgcaaatatttatcttggtatactgcttcattatcttctggtattagcagctgttctgatatttgggtatgcatttaactgggttaatcagcttcctgtctatgttttggctggaatgtgtgttgttgttttaatcctgtgctgctatttggatattagtagagttaaggctgatattgatgaaattaatggattgtgtgaaaatagattgtaatttgtaaggaacggaatggatatatcctctgggtgctccgagcaccagacgggtaccgaaaggtgatttacagagatgaaaacaggcctgacgaagtatcgctcagattagattaaataatctagtctgagcgattttttcgttcagggaaaaggagaaaatgtcattttttcaggaaaagcgttctacaatattattaatttccaacgcattttctttgttatgatttacgataacggacatttcctgtgtcgtttcttctgtttgtcttgccttttctaagatatcctgactgctgatatggtcggaatcaggaacatctgaaatagcatggatctggttttgaatattttgtactgtgttgacaaaggtttcagactcttctgcaatttcggatataataacctgaatttcctgaatggattggtagtaatcatgggtttcctgaaccaattctgtaaactgtgtttggacgtcattttgcaggaagaaaataatctgatcgaaacaagttttgacatgtgatatattgtttttagtttcattacagatagcctgaatatctgtggctgttttggatgaattagatgcgaggttaccgatttcgcctgcaactacagcaaatccttttccagcctctccaactcttgcagcttcaatagaagcatttaaggacagaaggtttgtctggcttgtaatgtctaaaatttgagatgccatttcatcaattcgcattaatgattgtaattcttccattgcattttcgatagctttttgattttctgcaatctgggtatttgtatttaccatggaattattagctaaggtctgcattttttccactttttgaagtaactcgctgctgtggacattaccctgacggatacgttcttcaatatcagaaacaaccattgtcatttcggaaatctgctgtcctacatcgtttacagtagcgttaatatcttctgaatgttctgcaaatgtctgcgtggattttgagttgtctgccacacaactaagcagtgtttctgaagaacgttgcattgcggtcgcagagctgctaagtgatgttgaacagtcagataaagtggcaatgatgccactgagtgcatcatataaagaattcattgcagttgcaatttttccaatttcactcttggtattaatccaaggcgtaagacgtttgctcttttcaagttttaaattgctaagctggataatcgcatcttcgacatataacagaggtctgacactgattgcaattgtgataaatgccagtacactgatgattaaaacgaagatgatacatatcagacctaagatgcgcatatttttgtggacgttctcataaatgttctcttcactgtcataagaaaccattgcccagccatgttctgcgatagactgatagcttgccacaaaagaatcggaaccttctttgtagttaagatcaccactggtttcgccggatttaattttatcaataatgtttaacagcatatcatcctgaatatcggtggcaatcaaactgctgtcgtctgcaaagatgtacatattagtttcggtattgaccatatagtagcggagggtgtcattttcgttttttaaatcatataactgtttttcaagctcttctacaaatggtccaccgcctacatatccaaggattgtttttccatctgtatcaaatacagggcagtacatggataaaataagttcaccggaggaaggggagacaataataccggcatcatacagaccgtttctttgtgtcatggcatcctgcagggcttttaaactatcaccttcacgggtagtcattccgattacctttgaattggaatgagcaacgatgtgcgtattccattcaccgatataaataccttcccagttgttaagaccgctataatagtcctccgtatagttttgcacgattgcctgctgctcagaattattgacatcctttaaaaagtcgcggacacaaggtgttttactgtaagcagtgaggatagattcctgacgtgcgatgtattcgttgagcagacttgcttgggcattcagggtatttttcataacattaagctcagattcctgcatcatgccagtcattgtcttatttgcagtaaggtaaagctggctcatgcaaatgattacgatgatggtaatgcctagtgtgattttagtacctaatttccagttcttcattcgtaaactcctttcttttagacatgaagtattatattgaattataacataacagatgagattgtgtatacaaaataacaatcggtacagagatttcgcttttaacttttttatctatgcatttttataaataattcagttatcagcattccatctcaaaacccgaaaggtcccatacttcaatcttctttcgtctttcaggcgtatcatcccctgattaccataatgaacaagaattatgttgcaccgaatatgccagttgaagaattacccgaagaatatcattatctccgagatttaacggaaaatgaagctaaaatcaatcgctattgaaggattaaataatctaccaaaggtcagtcgagaaaatcgactgtccttttttcatgccacagacagaaaggagcgaccaaccatgacaaagccaagggaacaaaatactaaaatcccttaggaactaagagcgcatttatacacccttgcgggcgtgtgcactctgcagaggacttatctctgcactacgatatcagccggatgaagtaaacagactgatagaaaaatttatcggtgaggtagatgggaaaaatttagcaaaaagtaaaaagacaatactctacgaagcgtagaatccgcatatatttaccattttctacgttccgtgggtgtaaaacatctattttatatactactctgtggtcagaaaggaggaaaacaatggatcaggtaaaaattggaaagtttctttctgatgaaagaaaggcaaaagggtatacacagaaacaattatttgaattgtttggaatcagtgataaaacaatatcgaaatgggagtgctgatcaaatcatatagacagggtatagcaacaacaggttgcttttcataacatggatttgtctgtatgatatgggaggtagcatatgggaaattacagtgattttgatcttgatattcgttcaggagaacctgcagaacctgcagcaatcacatcaaaggcttgtgaggttttatgggaaatggcaacagcttcacttgattattgtggtaaaagcagtgaattgatttgcccaacagatgcatgtacagtgggatgttcatgcgatacttgttctgcatgtcattcatattgtggagctgcatgtcgtagaattggataattaaaaagtttaaaactgtgttatagaaaataagcattaagcagcactcttattattaatttcaatgtaaagcgataaggggaaaccttatcgctttattaaaagaagaatgtgggattgataatcatttaattttacataattagatgtcagtagaaagtttattaatttttcttagagcaatacgataagaaatgtaaaaaaataacaatgttacaaggaaataaacagttagaaatattaaggagactataattctttgattaattagttcaagatagaaaaaagtatcaatttgggaactcataacaaaaatggtaatactatttaaactagaatagcatagtgcaaatagccaacaccagtgtggaaaatgttgggttccattaaaaagaactccttttattgacatccaaatgattaacgcacaaggcgctaatgaaataacccaaccgtttaagcttgtttgaaaaaaataatctagtagattagtaagattatctaatataattataccccaaaaaagtttaacataaattgtgttccgaatatttgtgatcctttcatcacagtgaatggtggttttcataagttgtcctcctcccaaaataaatcgtttaatgttttgttaagtactttacatatccgaatacaaagctgaagactgggattaaactttccgccttctagtaagttgatagtagggcgtgtaacattaactttggcagccagttcttcttgagaaagattcatctcaacgcgcgctaatttaagacgcatatttttcatatagataacctcctttctatgtgtattatatgatatatcaaacaaaatgtaaagtatataatacaaaaaataataaatatataacgttatgtgaaaaagattattatgtttttgtaatagaacttttaagtatttgattcaagtgttggagtaataaaagagttacgaaataaagtaaaagcaaagatagtgtcaaatgacctatgaaaaaactgagcaaaagaaaaaggctcagatgaaccttgaaaactgtagatcttttaggttgtggtagcccaccgccacccttgacggtacgaaaaagaactgctgtaggttaatcaccgacggcgaagaactcaagaacagttagagtttttccgtcgattacagcagtgtagcagttctttttcgtgccatcaagggcacaccgctttgcggtggctgggataattacctctggctctgaatctaagaacagttagcggcttcgccgtgttgcaggttcagaatcgtctgttggccaaggaagatgagaagctgccatttgcccagcatcgtgtcagcctgagacagcatttcgacttcatttaagactttatagttgttgtgtttgtgtggtcttaggaagttgtaataagcaacccagagggcgagatcatagttggctccatcgatgttatcaaagccgttggttttacgataggaagctttgtatgtacggtttaagcgttcaatcatctgcttgtaaggtctgaattctttagaaacctcatcgtcattggtgagtccgattacctgtgtgatttcaaacttaaacttatcaccgaattcatggaaga

SEQ ID NO: 14294 - DNA, 264767 bp, Unknown
  gut microbiota DNA sequence
ggctaccacaacctaaaagatctacagttttcaaggttcatctgagcctttttcttttgctcagttttttcataggtcatttgacactatctcataatatcgatcatataaatatcatccactgatgccttacccgttctggctctgcggtattcttttcttgcctctctgtctctctgcaccttcttctgaaaaaattcttctgcttccgcttcttcactgtcaataaattctaactgagaaaatgctttttcactcttcaacacgatttgctcccctagtttaccaagatgcatcgcttcctctagctgtgtaagtgaaatcactcccataataaaatcctgtgcaaaagaaaagtaggaatcatcagcacgatatcctgtcacaacatcatattgcgatatatctacaaagaaatgcttctgaagatattcttttgcttcttctgcaatacttttctgctgccaataactccgatagcgtgtcagtactgccagccagtttaaaatatgatactttgattcattcaggttaagcagcgatagctgatccatatgcagtctatattgattggcgtagccgtctgtattctttgcacatgcccattcctttgccaacataatactttccgtacaataaaatcctcttccataatcatttgagaaatttccttttccatattctggctttaaaattatatggtctgagccatgataaataatcttttccatctgttcctcaccattgttaaatctatatcgctgtagagatatagtcattatatcattcatataaaaccagcgcaagtaatacataaaaattcttgttttgttttcaatgtttatgttataatattccaaagcatattttacaaaatctttatggcgttatgccatctatattctggaaacgtcagattatccccaatgatctgcgttgttcgttcgtatctatgcttttaattacccattaacgaatttaaaagcaggagacgaaagaaatcagatatagaatatattattctcctgccaagacagtattatttaagagctgtctcaccaatcaggaggaagcctatggcaaaacacaaacgaaaccataacaaattatccagaaactcagcagtcaatatgccagctacaaacagaaactacaaagacactatttttcgcatgttgttttctgaccggaaaaatctgctctcactctataacgcagtaaaccagagcaattataataatccagacgatctggaaatcgtcacattagaaaatgctatttatatggggatgaaaaacgatctggcatttattatggataccaatttatatctgtatgagcatcagtcaacctacaatccaaatatgcctcttcgtgatctgttttatatttgcagtgaatatcagaaactcgtgaataagaaatctctttattcttcgactctgcaaaaaattcctgcaccaaattttatcgagttttataatggttcgacggcagttcccgactgcgcagagcttcggctctcctcggcatttgaacatttgtcagatgaaccaaaactcgaattgattgtcacggttttaaatgtcaatgagggacacaatgcagagttaatgcagcattgcaatacattaaacgaatatgcacagtatgttgccagagtacgacactatgcagcggatatgtctttagaccaggccgtggaacgtgccgtagacgagtgtgtcagggaagggattttagccgaatttcttacccgcaaccgaaatgaggtcatcagtatgagtatttttgagtatgataaggaattagaagaaaagaaattacggaaagcagaatatgaagctggtttctccgagggcgaaaagtatggtatagaactaaattctatcgaaactgcaaaacgcatgctcaaattacaggaattctcactcgaaaaaattgctgcgatcactggtctgccttttgacgaagtgaaaaaaatacaagcaaacgaagcgaggtctgattcatgaaaattgcattgatttctgatacacgacggaaaaggcattgcaattttagaattgacggataatggatatgacgtggaacggattctgctgtagacgaatgtatcagggaagggattctggctgaatttcttacccacaaccgaaatgaggtcatcagtatgagtatctttgagtatgataaagaattggaagagaagaaattacggaaagcagaatatgaagctggtttctctgaaggtgaaaaacatggacatgaggctggtttctctgaaggtgaaaaacatggacatgaaactggtttctccgagggcgaaaagtatggtatagaacgtggtacttttctaaattctatcgaaactgccaggcgcatgcttcaattacaggaattctcactcgaaaaaattgctgcgattacaggtctgcctttagatgaggtgaaaaaattacaataaatttaaaatgaatcattcccttaaaataacaaaaagagctcctgtgagctctttttgttatttatgcagtaattttcaattactgtaacagagaaagtacaccctgagtagactgattagcctgtgcaagcatagactgtccagcctgtgcaagaatgttgttcttgctgtactcaaccatctcttctgccatatctgtatcacggatacgggattcagcagttgttgtgttctcaacaatgttatctaagttgtcgattgtatgctctaatctgttctgtacagcaccgagagcagatctctgggaagaaacttttgcgatagcatcagaaattgcatctactgcataagtagcagctgttccggtagcgtctgttacattcaaacctttgattccaagatttgcagaattcattacatcaatgtcaactgtaatcttatttgtcatgtctgcatctgcaccaacatgtaagttgaaggaaagcgtgtcagctactgttgcataaccttttgtaattgtataggtagtctttccagctgcgtcatctgctccatcagtaactttcacctgaccatccgttactccaattttgttggctgctaataattctgttttgattttttctttagctttttttgctgtaataaccgaagagtcatcgtcatttatgccatctccatctgcatcaagcattgctacgtagtcttttccatcaacttttgctgttgaaccatcgtttacagtagtagcaactttaattgctgttccattggtctgatcaccgtctttataccaaccttcagctttagcaactgtagctgccatgtatttataagttgatccatcaattgtgatttcattatttgcttgtgcgtactttccaatagccgtaacaatatcgtccttatcaattccaattgtatactctttacctgcgatcttatacttatcgccttctttaagcgtatccataacaaatgttgcagattttgcactatctgttaatgttcctttcagtcctgcatcatgacctttcatatatacattctttgtagatgcattgtcaccctttaacagataaatctcattaaatttggttgtctcagcaacacggtcgatctcagttgtcaactggtcaatctcatcctggattgcctgacggtcagactctttagagtttgttccgttagctgcctgaactgctaactcattcattctctgtaacatggagtgaacttctgtcaaagcaccctcggctgtctgtacagaagatacaccgtcctgagcgtttgtggaagcctgatcaagaccacggatctgttttctcattttttcagaaatggttaatcctgctgcatcatctgctgcacggttgattctgtaaccagaagataatttctctgtggatttgctctgtgctcctgttgtgatgtttaacattctgttggcattcatagcctgcatgttgtgttgtactaccataatataatcctccttgtctcatctttttgatgagctattatgtttttctccggggaatccgttctccgggcttatttataacaaacagggcgtcccgggttttgccctatctattaccagatgatcgtgtgatgcaaaaactattctttcatcttttctgcatctcttttcgcctctgctttcatgcgttcattccataaaatctttttaatctctgcctgtgcttctctggaaattcccggctcagcataataggtatctttcctgcgctccgggtttgtttctgttttattccgggcaatattgacatctctcggtgcatccaccagaagtctgatatgatttccggcgcctcctgcgtataccacgcggatattatcaccaatgtttaaatattcaccctgttttaatgaaagtttgagcatttgttacctccctgcacacttacgttttttgtaatcacatccatgattttttttgcaacataacttacagaaatgttgcattttcgacatgaaacatgcggattttcattgttaaatcatgtatctgcaaataaaaacacttttccgttttcagctgtattttctaaggtgcggtcataccaaaaaaatgatggaaggaaaacaggtaataacaatcatgaaaaatccgttcatgagaaaatctgataaaaaattttatttcaggggtaaagtttccgaatgaatatccgatatagaatttgtaaacaaaaaaatgcaacatttctgtaagaaatgttgcatttttttatttactcacgatttgtacgttgtatatacagccattttgggatataactgtggatgtcaaagtgcagaaactgcacaatttatcatgaatttcaggaggtaattctcatgggaaccacgcagccaatcagaaaagaggacgagttatattcattccgtatgtattatgcagatgaaaaaccgaatgtccgcaattatacactcattgtcctcggtttaaataccgcactccgtattggtgatctattatctttaaaatggtcatctgtatacaacttccaatttcaaagcttttacgaccatattttgatccacgaacaaaaaactggaaaacgaaacaatgttctcttaaatgccactgcaaaggatgcactacaggcatatttcaatgagcggtctccggaggaaagcgaatatattttcacgaaaacaacctgtcatgaaaaaccgctcaaccgctcgcaggcataccggatcgtcaaaactgccgcagttcacaccacacaggaagactgcatcagttgtcattccctcagaaaaacatttggttaccatgcatggaaacagggaaccccgccagcacttttaatggatatttataatcattcctcctaccgcatcacccagcattatctcggaatcagccaggatgaacgtgatgagatttatctgaaacttgatctatgaccactcctgctgcagttcctgctcccgaaacagtgaatccacgatcacatagtactctgcaaggcgttccgtctttttgatcttcttgagaaacttctccggattcgtgaaactcttactcatatagcaccagagttccttcattttaaataacgtgttgcgatcgccggacatcacgcctttataaccatcacagatatcatcatggaacgcacggagtgtctgcttgtccactacattacgctttttgtttccaaccggtgtatccaaatctttagccgcaaactgagcctccaccatccgaagttctccgaccagccccggatcctgcaaaatacctctgccaagcatgactttttccgtcattggaaacatctgccgcaactgttcatatgccccgaccgaatgaatatccccattgaaacaaagtgaatgtctgctgtgcgctgctgcatactgataggtttccatacgcggcgaatatttataaaaatccttctggatccttggatggacgatcaactccgataacggatatttctcataaatcgcaaggagattctcccactcgtccggcgaatcttttccgactctggttttgatggagattttgcagtcacatgcattaaaaattttatccagaaaactgtccatctgatccggtaccgcaagaaatccagcccctctgttttttgccaccaccgttccggacggacagccaaggtttaaattcacctcatcataaccatattgcttcaactgttttacaatcgaaataaaatcgtccggctgattcgtcagaatctgcggaacaacttccataccctgattatgctcaggatcaatgtcctttttcactttaaaatccagttttttatttgtgataaacggagtgaagtaccggtcgatatcatgaaaatatttctgatatgcgttacggtaaatatagccggtcaatccctccatcggtgccatgtaatatttcattttttccattcctagcgatcatttttgtctgccagatgttctcacttgtccaaatcctgcagactttctattctatctcacatgagtcggatttatcttatcatactgcttcttctctttcaaatcagtttttttgaacataaatttccctactgccggttctgtatgatctgataaatctcctccgtctgcgcatcatcatagccactcatgtaatagtccgttccatctgccgtaaaatgtaaaaactccgtattctccggatttaaaaacacctcacattttcctacattgcggatgaaaaaggttcccttttccagtgtatccatcgctgttccacaggatttgctccacgacggaagttctgttattttatcaagattttcgatatctgtcacgtcaatctcataatctacattcagatgttttgcataaagtgtctgattttccacttgaagtctgatcggcgtaaaatcaagcataataagccagatgcacattgccgggattgttacgatcagcactatcacggaaaaaatagtcattccttttcctaatggtgttgccagattcatcgttgttccaattccaacctttttcgttaccatgctgtggcggtcttccggattgtaataaaaaattcctccgatccagcgtctgtcatctgcctcgctggcggttagatcctgtttgccctcataggcgtgttccacatttttcatctggcgcatcagaagaaccgcaagcccgcatatcagcagtgtatagacaacagaagcaatcatcacggacattcccatatccgctatccaaagagcagacgccggtatggtaaacaaaaacaacgtattcatccagttagcagcaagccagaattttttccatatatttttctttgcccgcgtaaaattcagattaatatcactgtcactgcttatgactgccaccggctgtttatccatccagaccgcacacacccacagcaatagtccacacagccacataattacgcataaccaactgacacttcctaattctaaattttttgcaaaatccgggaaaatgatttttactaataacggcatcagcgaaatgactaatcccaccagattcggcagaaaaaatattaaaaacttcacgcgccttacttttccaactgctttcagttccacatagtgctccataactgcgctgtcatacagtttctgttctcttttccactttttcaatgcaccgttcgcatgtatcaacggaaggcacagtaacccgatcaccaaaagtatccacatcatccagattgtcagctggatcgacatgtattttgtgaaaaagcttgtaaacggaacgagcattaaaatgataacatatctcttcatctccgtttgaaacttttcaacaatttcctgtactttaggctcttttatccactccggtttcatatttactgcaaacagacatccgttggcatattgatactgcccacggaagcaaaaatagaggactaataaaaccggatacattgtgaaaaacataattatgtttacgatcatagtttttctcctttcaaagctggattgtaataggcgtttgcgaaactcctcatactcttctttcaattgttcatcaaatcactacgtattttattcatacaattccccgcagacttcaaaaaattcttccttcgtcatgccgctgaccttcgcttccgatatgatctgctgcaacagttctctggacttttccgaaagttcttttgtttctgtaaattccttccgcacgcgtgcgccgcttctccggtctgcatatatatacccttcctgctttagcagaccgtaggctttgttcaccgtcatggaattgatcccgatctcttctgcaagcccccggactgtcggaagctgttcgcccggtgcgagccttccgtccgaaattccctgtacaatctggttgcggatctgctggtaaatcggaatctcggacatttcatttatggatatgaccatgtggagtcctcctgtctttttctcattttgtcaatcttttcgtctttcttatccatttctcactggatcttgtcaaaaaaaatatgtattgtttgtattaactattataatacaaacaatacatacgtcaagtaaaacatgttcagatcactttaaaacgtcccgcatcatctgcgtacattgcgtttgtctcttctgctgcatttttatccagcttcgatatgatctcttcactattttcagtggactgctttatctgctgccttagattgtctcttttaagaattttggaatcggcatcacctgccggaatttatgcctgttctttcaaaaaagtcaaaaatgtctggacgcctcctccgagtaccctgaccgcctccgggcggtttccttcaatcgcagacacatcaaagaaatcacctgctttcgatttctctgtatacataaaactgtcgcttccatacagcccatgctcaatctcaacaaattcatcaccccagaatgagcagtcctctgctgtaattctttccgctttgaatctctcaaggaaaacatcgacattgtcactcttgcaggaaattccaacctccagatatttggcatcgcaggttgccgatactttctgtccgaatttccctccggtcgactctgcgatatcgatcagttcctttaatccggattctatgccatgctgtttcaaaatccggcgcagatgctccacctcgtcgccctgcataaaaagctggtctccacggtcactttccaccataagatcgatcttgcagtaatttgggcggctgaatacgatgtctgttttcaacccatattcccgtaataatttcacatggattgcataacagatatcatggattttcaacaatccttcctgatctgggatcattgatgcgaaaatttccggtctgccgtccgtgatctgataattatatgcccctcttccaagtccgaagaacagattcttctgttcttcctccgtgaaataagtatggaacttcccacctgctattttatcgtaagttgttccgcttacgatcacaagctttgttccctgctgcaataatggtttcattgcagcagctgcatcctcgactggcgcagttcttgatgtcactgccgttccgtcccagtcgaagaaaatcgctttatacttttttaccatagctgtctccttttcttttctaacatttgcgaaactcaaatttaggttgagaagattgtgcaagataaacaaaatcaacgaagacacgcttgcgctatgtgtcgctcacagtggtactaaggtttcagccagcatagccatcctcggataaatccggtctgactatactgactggaacctaaggaccggtggctccccaatgtcttcttatgcttttgtttatctttcacaatctaatctacgttacagatgagtttcgctggtatctacaatatataagtttctccgcacttaagctcaacttccttacctcggactgtgaaagcaatctcatcgccttccaccaatgtaaacttcgcctctgtttttgtaatgcatacctctagaagtgcacccttgaatttcaatcggaatgcatattcctcccactctttcgggatggtcggtttgaatttcaacacaccattctgacagcgcacacctgcgaatccattaacgattgcctgccaggttcctgccatattggcggcatggattccagcatagaagttgttgtggtaatcatcgagatccattcttgcagactgcgaaaaatatttatatgcttcgtccagatagccgatatcacatgccacaattccgaaaatacaggtggacaacgaagaatgatgcaaagtaacttcctgataaaaatcatagtttctccgaatttcttcttcggtaaacagatcattatgcaggtacattccgaggattgcgtctgcctgttttgacatacggtggcgcatgataaacagtggatgataattctcatacagccatgctcgtttttccggtgggattttgttttcgtcccacggtttccgcatcataaagccatcgtccatcggataaacctgacgcttctcatcgtatgggaagtacattttttcgatgatctcacgccaaagttccagttccttcacagagaagtccagcttctcttccaatctcttgagatcttccggtgcatgctcctttaagtattccactgctctgaccgcatcacgcagattctctcttgccatcaggtttgtatagaagttattgtcaactaacacgttatattcatccggtccggtcacatcacagatacagtattttccgcctttgcactccgcaaaagaaccaacatctgcccatactcttgcagtttcgatcagaatctccgcacctttctgtttcaggtactccacgtcacctgtcacctgaaggtacaaagatagcgcatatgaaatatccgcattaatatggtactgcgctgtgccaagcggataataagtggaagcttcctcaccattgattgttctccacggatagagtgcacctttcatgtgacctaaaatccttgcacggtctctcgcctgtggcagcgtcgcatagcggtaatctagcagctttcttgcagtctccggttctgtaaagatcagaacagggagtacatacatctctgtatcccagaaataatgaccttcgtatccctctccggaaagtccttttgcccccattccagtctttccgtctcttccggctgactggataatatggaacagattaaagtgtaaaccctgctgtagttcttcatttcccttgatctctacatctgctgtcttccagaaatcctgcatataactcttctgctgttctttgagcttctcatatccttcgctctttgcagccgcaagctcgtcctgcacaaaagcttccagcttctctttctccatgtcaagactggtcgaataacagataaatttatcgagtgtcacgcactctcccgcttttgctgacaaggaaactctggatactgtatccatttctcctgcttccgccatccagttcacgtccgtcactgtctgtccatcacaccataattcatgaacacttccgcatgccacagtcaggtgacttccctttgtcgttccctcataataggaagtgtcgttctccgctttcacattatcaggatcaagtctccgtccaaatggtccatagtccacaatcggattggtttttcttgtatgattttccacatctgcctgcattttggacacaaactccaccgttccaacataattgactggtctgacctgataacggatcgccatgatgttttttctggcaaaggaaacaagacggaaaatatgaatttctgtcatttttccacttgaagctgtccatgtcagttttctctccagaataccatccttcatgtgaagcgttcttgcatactctttcacttcgccctgctccatcgtgaactcctcaccgtccaaaatgacatggatctccttcaggttcggcagatttaaaagcgactggctcaaaagcggtgaaccaaaattcgcctctccatagcggatctcattgctctcataaaagccgttgacaaagtttccttccagaccggtatccacatcgaatggatatgcctcctcgaaagttcctcttgtgccaatgtagccgttagacagcgcaaatgtcgtctcgtttctgtaattattttcttttttgaatcccgtctccgtgatattccattgttcgatcggatatattggttttttaaattccattattcactaactccttctgttttcctaatacacaatctcccagaacaactcttctcttttgataaacgcatataaaaattctaccgcatcctctttgatcgcatttttatgacaagccagcgcacgtgcctttctgttcacagaaaaatcaagtgcctgcatatcttccggaactgcaaagctgatgcgttcttcccattttaacaatcctttatcaaaatcttttggacacgcaaatggttcacagacatccatactcttcgcataatcccagatgttatctctcttagcagagcggttcggccaattttcatccccggcatttgagtggactactcctgaaaataatgtcggatgatattctttctcctccgtcagaatctctttaataaaaagtaccagcccactgtgatccccatgtctgtcatattctgcggttgtaaaaatgatttccggacgtttttccataatgatttcttttaaatcctgtttaaattgatttcttgtatacaaagcaggttttccatacttttccgcatgataatctttcttgtcaggaagcgcatacgtatgatccgaacagtgcgacacatgtacacggtcttcctcgctgtcatcatataactgatgaagaaaactctctgtctcatccatccctgtatctgcataaccgagaaatgtcacctgtctctcgcccagtccaagcacctgaagccctgccagtgtctccggcagacggacacttccggttgcctcatcatgtccttcataatcaccatttcccgccatcactacatgaacaccaattccttttgcaagtgctttctccataatacctgctgcaagaaggatctcatcatcttcatgcggtacgatcaccataatatttttgattcctgcatccagttccattcgtctcatattcttctccattctgcaatatcgtcttaccccttcactgcaccggcagaaactcctgcgataatgtatttctgcatgaaaatatagaagatcataagtggtgcaacaccaagcatcaacattgggaacaacgctgtccagtccgttgagaactgtccgatatttctggacacttcctgaagaatgacatcctgctcacggctctgtaaaaacagaagcggtgtcataaattcattccagacatttaaagtcacaagaatgacaaccgttgcaataaccggttttaataatggaagcacgattacaaaaaatttgcggatcacggaacagccgtcgatttctgctgcttcctctaactcctttggaatggtcgattccacaaactctttaaacaggaaaattccctgtggaacattgatcgccacatccacaagaatgactgcccatgccgtgttcatcagtccgatacttttcacaattttaaacaggctgacaatattcatctggaacggaacaaccagacctgcaaggaacagcaggaaaatgcggtttccccatctggacttcgttcttgccagcgcataacctgccatggatgtaaccaaaacaataattgcaactgcaagtactgtaatttttacagtattaaacaatgctctcggatactgcatatttacaaaagcatctacataattctggaatacccagacttttggaagccccaacggagactgtgttgcctcctgcggatttttaaatgtcgtcacgatcaggtaataaattggaatgaaccataccgctgccagaagtatcataaaaatctctgtaataacaagcccgcgtttttcttttttactgactcccatttcactacttttctgttttatcatgagatagcctccccccattttcccattattttggttgtcacaccgctaatgatcaatacgatgataaagaagcatacaccgaaagcggaacctaccgaatagaagccatccgagatacctttcttcatcataactgtcataaccgtttccgttgcatttccaggtccgccggaagtcatggagtagattgcgtcaaacgctttcatacctccgatcagtccggttactacaataatttttacggaaggacacatgagtgggagcgtaatcctaaaaaagctctgtctgccgtttgctccatcgatctgtgccgcctcatataactctggtgagatactctgcaggttggcaagaaaaataaccatcgcccagccggtccactgccagatctgcgtaaatataacagagaatagtgcccggtttgtcgtgaagaagttaatcgtatctaacccgaagcggtgaagcagattgttgatcaatccatagtccgaggacgataaaataaagttccataaatatccaataatcaaagaactgaatactgccgggaaaaagtaaaccgcacggagcagatttcttgtctttaactttttattcaaaacagcagcgatcggaagaccaagaattacctgaaatccagtcagtaatatggcataaatcaatgaattcttgattgcaatccgcattaaaggcgtctggaatacttttatataattctgaaatgcaacaaagtgcagatttgttggattcatatcagtataatcagtaaaactgtaaaaaatggtgtacataaacggcaaaatactaaagatcagataaattgccagtgccggaataataaacaccgcaaagtaacgtccgagtgaaccacattccctttttttctgttttttattcataaaatcttgcttcctttccgaaaaaaggcagaaaaagagcctcaaacccatcctcactgccgagtttgaggcatcttcactgcactcttatctattttgataataactcagaaaccacttcatcaaccgtctgtaatgttgtggataaatcctgcgcacctaaaagataactctgcatctctgttccataagtctcatgtgcacctgctgcagaaccccattcattccatgggcagtaaacatttcctgctgctaacgcacctgcgacacttgtatatgcttccggaaggtcaaattctactccatttaagtaagaagaacccccctgattgttctgccataaagcgttctgtccatctgtcgttgaaattgctgcaagcacttttttcactgcgtcaaggttcttggaagaagcatttgctgcaaatccacagccaggaccaccaatgagccagcctgcgctctcttttgttccatagaaaggcatcatgtcaagctgtaactccggatttttttccatgatcgcatcataatcccaaggaccggagcagaacattgctgaaccgcctgttgcaaactgctctactgcctgatcatgatcaatacctgtcatgtctgctgtgtatacaccattatcgatcagttgtgaccatgtctcgatatatggattccaggttccgtccattgtcacttcgccgttacgatatttttctccaaaaccttttccctcatctgtggacagatactctgctgtcacaaatgccatagaactctttaacagtggttcccatgattttaagcctgctgcaagtggtgtgactcccgcattctggaacgttgtacaaacgtctaaaaactcatcaaatgtctttggaagttccacattattttcttcaaaaatttctttgttataatagattccttcaaaccagctgattcccggaagtgcataggtacttccgttatatccgtaaacacttgtacctgctgtggaataatcagctgccagatcatccaacgcttccagataacctaattttgcatgttttaatgcagaacccggtgactcgcagatgatgtccggtccttcgcctgcggaaagctgggtatcaataattgtatcgtagttagagttatcaataaactgatattcaatctctacctccggcactgtctctgcaagataatccagcattgcctgtaccgtgtcttcactgttccagtaagacatacggatcgtcaccttgtccgaagaatccgttttctctccctttgtctctgtcttaactgctgagtctgtacttcctgtatccgaggaacttccacatcctgctactaccccaagtgtcattgctgcgcacaataatacgctcaaaacttttcttttcatacctttttctccttttcccgaaagaaaataccgctgtctgctgctgtttttctctttcatttgatatatttatcatacagttgaacatagcagaaaaaaataatactttctttggaaaagtaatactttttcatgtattttattttagattttccttcggcagcgtatctggcatctttaccgtaaagcaggtatattttgcatcagtgactttcacttcaagacttccgagtgctccgtaataaagctccagacgttccttgatattgtggattccatagccttttccctgttcattcaacaatttctctaccatttcaagttcgatcaacggtccgttattgtaaatagaaaataccagttgctccggttttctgcaaaactccacaataatttttccagtgtccggttcttccatataatcaatgccgtgcttcatcgcattttctaccagcggctgaagcagaaagttcggcatacagcattcgagaccactctcatctatcctgtattccacctcaaatggttcctcatgcatttttttctgaatctcaatatacgcccggatattctccaactcactgctcaccgttgtgatctgttgtccgttgtttaatgctgtacggtagaattttgccaaaagtcctgtgatatcgctgatatcatcatccccttttctgagtgccttccacttaatacctgagaggcagttgtagaggaaatgtgggttcatctgcgcctgcagcgctctcaattcggattcttttttctcaatctccatcttgtatacttcattaatcatagtatctaactgcacagtcattcttccgagactattcgtaaccatgccgacctcatccgtatcggttgtgtgacagggattttgcagatctccatttgcaatacgctccgcctgatccctcaactgcaaaattctcttaccgatcacgcacgacagcactccgatcaccaccagtgtcaatccgacacaggcacacactactacaatcgtagataatataatggaataaatctgttccgagattgtattccggtcaatataatagtaaattttccagtcgactttttccatcgatgcttcttttaaaatatattctttatttaagacggaagcatcctccgggttatctccgatatatgcttcaattttctgttccagctgttcatcagcaattttttttgtataaattacctgaccatttccatcttttatcacaattccgttatccagataatccatcgtatcaaacggttccaaaatccggtttaagtaaaattccgcacgcaggacaccgattcttctgctggtcgttgccgtatctaaaattgtccgcgttgcatacagctttccgtcctcctcaaccgtccactctgtattaaaatctttttcatgctttttgtaccacaccgtatcctcatatggctccgccgactctaagaaggagccgatgtccgttgccgtatatggtgtgacgatcttgatcatttttaagttttcatcactcgttataaaataccagaatatcggttccaccgtcttattcaggctctgtgcgattgcactaccattataggcattcccctccaacgtctgtcgaaattccagattatacgccagatattttgtaaaatctgtctctctctgaaaaatagcgtctgcctcctgacacatacgatgtaaattattgtccatcgtcacttctgtctggtccagcagattttgatttgccgcagaaaacgaatgaataccgagaatacataacggaatcgacaccaaaataatataacttataataagctttttctgcatggacgcattatgtataaaccagttacagatttttttcacttgaccttctccccacttcttatgtatttctgtcaacatgaccgtaccactgtatcatcacttccaatttttctatttatttctgctcacgatactgcttcggtgtcacaccatagtaatttttaaacagtttgttgaaataaggctgatttgtgtagccacatgcttttccaatatccacaatcttccagttgctctcctctaacagttctttcgccttcttcatgcgataatctgtcaaatatttcacaagattgtatcctgtctccttcttgaatataaagctcacataggacgctgtgagacagactttttctgcgatctcttccagaccgatatcatgcatatactcgtttttgatgacttttttgatttcggatactgtgagacttgtatccggcagactctgtttctgggaaacagtaatctcccgtatcacttttgacacaacttcgcccactttacaaagatcatgactgttcataatttcatctgctgtctgcatgatcaggctctcgttatagatgccgtatttctgataaatagccttgacaatatctaaaatcagatactttgcataaaatgcactcgacgctttttcattttccagacgtttcagatagaccaataactgttcttccactgcaggcatattttcatcctcaatgcttcggaaaatactatctttcatctgcatggtttcctcaagtgttcccgtatcccgcattgctttctgtgcaatgtagatcacacccgaaaaataactgaacgtgtcattccggacgtcttccatttcctttaccctgcctgaaaactctttcatcccgaagaatgttgttccgacaatgatcgatggcatctctgctttttcctcggttaaatctgcatataataaacggatggaattctccactttccgttcctcaatcggctctctgctgtagaccatcacgtaaatctggtttggataaaagtcaatctgttcataaggtaatttcatatttcgcttcaggattttttcaaacgcttcctcacacagttcaaagtagttgttccgcgtctcaatgctcacgaaacagatgtatttattttccagattgatctggtattctttcagcctttccacgatttccgtcacagaatccttcgtattaaaaagtctgtataacaataattttttgtccgcaactaaaaggttttccttctgttctttccactgctttttctgtctgcaaagcgtaatgacatgccccatcacctgtttgaattcctccacttcgatcggttttaacaggtaattgactgcgctcacctcgcacgcctttttcgcatagtcaaactcgctgtaggcactgaatataatgatgatcacatccggtctgttttcttttgcatattttgcaagctctagtccgtccatataaggcattttcacatccgtaaataaaatgtccacatcctgatgtttctgaagatactccattgccagttttccgttggctgcttccgctacttcaagctcaaactgaaatttttcaatcaaaaaccggattccctcacgctctgttctttcatcatctactaatagaattttcattttccccacaatccttttttcttctgtatcatttttttacgcatactatttctaatctccgcttgccgacattctttcatctcttgccgttttgtatacactgcctcaattatattgtattcatccggtatcctgtttgaaataacatatttttttgattccttgcaattatttggtatctttcatttttactgcagattattcaccttcccaactgaaatatatccatcaacaagtgcccggaaatctgttccctccggggcattctcattataatttccatgcacagtcagtcgtattctcccattttcaagcccctcttccagatactcgtcaatgaaaaatccacagtctgcaatttttctgtcatataaaattccccgcagcttctcaagtttgcactgcggaaaatttacgttccagatctgattgtactccagaggctgttccatcaattctttcagcatctgctcaaggtaagcgtctgtcacctcatgacactccgatgcaccttcagaaaacgcaatcgcatgcacacctgcgcacgcagcttctagcgcagatcctacggtcgctgaatactgaatatctgttccgctgttatatccataattaataccggaaaaaacatagtccggcttttccttcacaatatttaaaattccaaaacgtacacagtctgctggtgttcctgtacttgcatatgcgtgcacaccctccaccggaaaatcaaccggaaaaaactctatcgtttcacgtaatgtgattctgtgtgacattgcactgcgctgtccgtccggtgccaccacccagacttcaccatatttttttgctacacatgccaaacggatgataccatctgactgtattccatcgtcatttgtaattaatattttttgcattatattttccactttccacaaattttctgagactctcttctccatgcttttctatttaatttatcatatccttttttccacgaaaatgcaaaactcctcaaaatgaggactttttaaccttaaaagtcctcattttgaggagtttactttttcgttcatatacataagtataaactgtattcccttattctctgttttcatattaaaatcatcgccagttatactgctttacttttctccgaaataagcacttttttcaagagtgatactgggtggattcgaaccaccaacttcggttttgcaaacctatgccctaccagcggctacagcatcctattttttcaattctaacactgtctggctttgccggacagcaaaccttattttctctaaaaaatccctcatggagtgggtttatcaagtttccatgagggatctgtctcaacttatcttggactgcctgttgtacaaatcgaatttgaaatcctgccgcagccaaaatctaaaaaacttagttactgaacaaagcagtggataaatatctgtctccagaatccggaagaagtactacgatattcttgcctttgttttccggtctctttgctaaaatagttgctgcttttaatgctgcaccggatgaaataccaactaatacaccctcgcttactgcaaatgctcttccctcgtcaaatgcatcctcattttcaatcgggataatctcatcgtaaatagaagtattcaaagtatccggaacgaatcctgcaccgattccctgaatcttatgtgctcctgctttacctgtggaaaggactgcacttgtagcaggctctactgcaacaacctttacatttgggttctgctcttttaagtattcaccaacacctgttacggttccgcctgtaccgacaccggcaacgaaaatgtctacttttccgtctgtctgctcccagatttccggaccggttgttgctttgtgagctgccggatttgccgggtttacgaactgtcctaagatcactgctcccggaatttcttttgcaagttcatctgcctttgcaatggcacctttcattcccttagcgccttctgtcaaaacaagttctgcgccatatgccttcaaaagatttctacgctccacgctcatggtatccggaagtgttaaaatggctctgtatcctttgactgctgcaactgccgcaagaccgataccggtgttaccgctggttggctcaataatggttgcgccctcttttaaaattccctttttctctgcatcttcgatcattgccagtgcaattctgtcttttacagaaccagccgggttaaatgcctcaagctttactaaaatggctgcatctgtcacgcctgcttttgcagcatatctgcttgcgtttacgattggtgtttttcctactaactctaatgtgcttgatttgatatcactcatgttgatcctccttgtttttgcgatacatttttgctttcctatgcctgcatgctttatttctgctgaaattttctttttgcattttctgcgaaaaaaaaatggcaggcatcatatgcacgacacctgcctaagttacacgttcttacttatcgggtacacaatgcatatgaaaaataaaccgtactcatacatacagccttacaacagcaacaacacatcatatgatttttctgtgttcttaattctgtgtttctcatatcattgtctcctttctcatttcctactaaacatataggaatatgtgtttataattgaattatagcgattgacacctttgctgtcaactgtttttttatcatttttgcaattcttttcgtcaggatacatttttctgttcgcttacattgcattgcaatcacgacgtatgactgctgctccttttgattcagcttgcagcttttatggtatctgccggaagtacttctgcgatgcgctccaacgcctcttttaacgtactttgcggacaagccacgttgatccgctggaatcctcttccgcattttccaaaaattcttccactatccagccagagttttgccttgtgaacgatcaaatcttccatctcctgtgcgcacaatccgagtccgttaaaatcaagccagaccagatacgttccctcatgttccaccatgttcacgcccggaagatttttttccacaaattcttttgtaaaagcgatattgtcagccacatattttttcatcgcctgataccactcttccccatcccggtaagccgcctcacatgccacaagtccggctgcattgagctgactgtatccggcggctgccaactgttttttgaatgtatttctcagtttctggttcgggataaaaatattagaagtctgcagaccagccaggttaaacgttttgcccggtgaagtgcaggtaatggtccactccgcatattcctttttcagatttgcaaaaacgtgatgttttccctgaaaaacaaaatctgcatgaatctcatcgctcacaacgatcacgtgatgtctgcagcagatatctccaattgtctccaactcctcctttgtccacactcttccaaccggattatgcggattgcaaaggaaaaagagttttacttcttcctctgcgatttttttctcaaagtctgcaaaatcaatatgatagcggttgtcctctcccaggaaaaggtcactgcttacgatttttcttccattatctgaaatcacctctgagaaaggataatataccggtgactgaatcaatactgcatctcccgggtctgtatatgcttttacggacaatgccagagccatcacgacccccggtgttttgaccagccatttttcctgtacttcccagtcatgatgtttcttcagccatcctttcacagcttcaaaataggattcctgtccatcactgtatccaaaaatcccatgctgtgcctgtctgatcaatgcatcctgcacataagatgatgtctgaaaatccatatctgctacccagagtggcagcacatctgccggcattcctcttttcactgcaaaatcgtattttaagcaattcgtatttcttctgtctgtaattttgtcaaagtcaagatttctttctgccatgttgcacctctggtttcttctatttgtaatatatttccatgttctgttattggttatagcaatttcctactgtttctgtaggtcttattggatatatacatcatagcaggttttgggaatttgacataattcattttaactagaatcggctataggtatgacctatagccgatagtgtatctgaaaaatctcctgcattacatctggttaataatctgctcaagatcttcacaatatttttttgcgtcctcgaattttccagcctgaagtgtaaatgcaatccggttttccacttcttttttcttctgctctaattccagataatttttatcaaagtgatctgcatagatcatttttcggaatttgcggatactcattttacgaagttttttatcttccaccaaaagaacataatccatgcagtttgccactgtataaaaatcatgggataccattaagacagctccctcatatttttcaatcgcctgctctaatgcaagctgggaataggtatccagatgacttgtcggctcatctaaaagaagaaggtctgcatttgttcttgaaattttggcaagctgcagcagatttttttctccgccggacagattttctactttattgtatacaagttcttcctcaaatccataggttttcagataagcgacaatttgtgcctctgtctcaaatccaagatcctcgaagtttttcaaaacggtttctttttcgtcaaatacttcactatgcatctgggaaagataagctatttttgtgtccggatctaatcggattgccggattgctgtttttataaatatcccgtaatatcgtcgtttttccggttccgtttggtccgacgatcgccactttctctcctgcttccaaagaaaatgtcacgtcttccatgatctgtctgtcgaatgtaacactgtaattttccacggaaagaatatttctatttattccacattccttttccgcagcttcgattgtaattatattttctgctttatgattctgttcttccccttcttcgcttgatgtctctgctgccttgttttcctcagcaagattctcccgctccaacaattgtgcactggtgtgtagctcgatctgtggctgtttgatatcaacaaacggcgacttggtttttcttgcctccaaacgctctaacaaagaaactctcgcttttaaactccgtccctttgttgcactatccacttttgttgcttcatttctcaggcgttccacaatcttgcggttacgctcaatttcttccatatctgctgccgcaagttcctgctgctcgattttcatctcaagcagcgcaaaattgtaatcaatataagagccgtcgaactcctgaagttccgcattctctaaatgcaggattttattaaaacagtggttcagcaaatagcggttatgtgtgatcacaagcagcgtgcccttgtgcgagttgatcagatttttcaacgcattcagatgctcaaaatcaaggaacacatccggctcatccatgataatgaatttcgggctaatcatcatttcacggatgacctggatcagcttgaactctccgccgcttaagctggtcagaagatgatcttcataatctttgaggtttgcgatttttaactgtttgcggatgttgctctcgtaaaaatcgccgtcaatcgcctgaaactgatccatgacattctgatagcgttccatgagttcatctaactcatctgctgttgccattgcatcacaaatctcattaatctcattctgcaaacgcacaaattcttcactgagatagtcaaaaaccgtaacttctttttcctcatccagcgaataaaactggctgacatatccgattctgcccggcacatccacaatcaactttccgtcatacagatagttgtccgggtgcagaatcatatccaccaacgtgctctttccggtgccattggttccgatgaatgcgcagtgcacatcatcttccaacgtaaatgatattttgttatataagtccttctgcgggaaggaatacgataatttttctgcttttatcataaatttctctttcctttttttattgttccccgctcattgtagcataactttcgtaatgtcacaatgcgcagatgtcctgacaacacctgcgcatttttcctgattcttccatatattcttattattttccaaaatggaaaaatccttttttctcataaggttcactcttgtaggaaacgagttcgtaaccaatctctttaatctctttttttacccacggaatatcgatctcattatcactgataatcactgtttctccgtctttcgcagaggatgttaccttttttacctgaaaatttttgcggatcagatcattcatatgggactcacacataccgcacatcatgccgtcgatttttaatgttgtttttatcatagcattcaccttttcctgatttgcaattacgaaatccattgtggaaacatactttaataaaaatggatttctgaaaacatcttcaatatatacccatgtggggtattcgtcaattttgttttgctataatgatatttcttctcaatacacttttttacacaaaaacctcccacaggatttttcccatgagaggttttgtaaattcgtccgaaattgtatcggcaatcgattaacgtttactgaactgtggagcgcgacgagctgctttgagaccgtatttcttacgctctttcattcgtggatcacgtgttaagaatccagctttcttaagaactggtctgtaatcagcgtctactgtaagtaatgcacgagcgataccatgtctgattgctcctgcctgtcctgtatatccgccacctttaacgtttactaaaacatcaaatttatcagatgtctctgtagctactaatggctgacgaacgataacttttaatgtatctaatccaaaatattcatcaatgtctcttttattgattgtgattttacctgtacctggtactaaatatactctggcaacagatgattttcttcttccggttccgtaattctttgtattagccaatgtcctttacctcctaattagaatgttaaaacttctggtttctgagcagcatgtttgtgatcaggtccagcgtatacaaataattttgtgtacatctgtcttcctaaaggtccttttggaagcatgccttttacagcgtactcgataactctttcaggatgttttgctaacatttcttttaatgtagtctctttcattccacctacataatcggagtggttgtaatatactttctgaagtaatttcttacctgtaactttaactttctctgcattgacaacgattacataatcacctgtatcgatgtgtggtgtaaagattggtttattttttcctcttaatactttagcaacttcagatgctaaacgtcctaatgtcataccttcagcgtcaactacataccattttctgtcaatggtagctgggctagccataaaagttttcattgattttcctcctagaaataatgttatgaaatgcttccacaatgtgaatgtccaggacacattgcttcttcattaaataaattgtttatagttcaaatgtctcaccggggcttttggttcgacattaattcactatcacagacttatgtattatagtacacgaatccttgtgtgtcaagaaaatctttctataattctcgacttttcttgtacttatccacatgattttctattttcactctctttatccactttggattgtcagataattatgaataccatgttccagatatacattctgcatcctcatacacaatccccatcatcgtaagtccatgtgccggggcagttggtcctgctgctgtgcggtctttcttcccaaggatctgtggcatctcatccggcgccagctcgccgccgccgacacggatcagcgttcccgcgataatgcgtaccatattatacaggaagccatttcctgtaatacggatcgtgataatatcgtcctcgtctttctgcacttcgcatgcataaatagtccttgttgtggtctttacctgtgccccaactgcacaaaagctcttgaaatcatgctctcccacaagatacgatgccgcccgcttcattttgtccacatccagtctgtgatgataaaaataagtatccagcctgcggtttggcatacggaaagtacggtttaaaatgcggtactcatatgttttccggctgacctgatatctcggatgccagtcgggcggaacctcgcacgaatcctgcacgacaatatccgctggcagcctctgatttagtgcaaatgaaattttatctgccggcattcttgtctccgtatcaaaaatggctacatttcccatggaatgtacaccggagtccgtccggcttgcaccggtcactgtgatttcttcccccagcagctttgacaggttttcatttagcacctgctcgatcgtgattccattcggctgtacctgccaaccgcagtaattcgttccgtcataggctacgatcagttttactcgcttcatccaatttcccttttcttcatctacacctcttcagataattttcgtatatccagtcactttacattggccaaggcaaaaatgtacggcacaataagatcacgataaaatacgcaaagatgattgcataagccttacgatccgccgccacatatttcaatggtttcattttggtacgtccttcaccaccattatagcagcgcgcttccatagccattgcaagatcatccgcacggcggaatgcagaaacaaaaagcggtacgagaagcggtaccatgttctttactttatgaatcagatttccactctcaaaatctgccccacgcgccatctgcgctttcatgattttgtctgtctcctcgatcaggatcgggataaaacgcagtgcaatagacatcatcatagcgatagcatgtaccggaataccgattttgttcagtggcatgagtgacttttccagaccatctgtcaactgatttggtgttgtcgtcagtgtcatgatcgaagtaccaaggatcaggtatgtgaggcggattgccattaatacggcgttctgcgctccctctgccgtgatttttaatatccacacctgaacaatcggctctcccggtgtcagaaacaggttaaaaagtgctgtgatgagcattaacaccatgattgcttttaacccttttaccataaatttaaatggcaccttcgaagttttgatcactgcgaataaaaatgcagtagccacaagcaatgctgcaattcccttaaagcaaaacagcgaaatgatataaattaatgttgcaaataattttactcttgggtccagtttatgtatgacagaatctgccggataatactggcctaacgtaatatctcttaacataagttctccttaaatccaaaacacaattttgctattctacgattgggatctccgtatgtggttcccttccaagcaaaacttccaacagactttccctggcttctgccacagtggttgcctctgtatttacattcagtcccttttctttcagttcatgcatcagataagttacctgcggcgctgccagtccgatctgttctaactccttataatgtttaaacacctcgcacggagtattatcaaacatcacctgtccatgattcatcacaataatacgctccacatattttgcaacgtcttccatactgtgtgaaacaaggatgactgtgattcctttttccttatgcattcttgcgatcaggtctaagatctcgtctcttccggcagggtcaagtccagcggtcggctcatctaagatcagtacttccggcttcatcgcaagtacaccggctatggcaactcttcttttctgcccgccggacagatcaaatggtgactgataataaagttcctccggcagtccgacgctctttaatgcctcaaacgcacgcagcccggcctgttctttggacaatccctgatttttcggtccgaagcagacatcatcaaaaattgttgtctcaaacaactgatgctccggatactgaaatactaatccgacacggttgcgcagctcccgaaggtcaaaatcctcgtcataaatatcctgaccgttaaaatagattgttccggaagttgccttgaccagaccattcaagtgctggatcagcgtagactttccggagcctgtatgtccgataattccgataaactgtccgtctttgatctctaaatttacgtcctttaacgcctgaatctgatatgcagttccctcgctgtatacataattgattttatctaaaatgagtgacatggcaccctccattattttttccacgcaggttttctccacctgcatgcggtattccacgcttcctgcgtacatcttatcctgcgactttcataatcgcatccacaagctcttctctcgtcagaactcccagtggaatatcaagtcctgactgacgcagcagatcagcaagcaatgtgatctgtggcacatccagtctgtgttccttcaacgttccaacctgtgaaaagatttcccttggtgttccctgcatcacaatatgtcccttatccatgacatagacataatctgcgtctacaacttcttccatataatgtgtgatgagcagaatcgtcacaccttttttctggttcaattcatgcgcagcatgcagcacttctctacgtccattcggatcaagcatggcagtcggctcgtctaacacgatgcattttggttccatcgccataacacctgcaatcgcaacacgctgtttctgtccaccggaaagtttatttggggaatgatgtctgtactgtaacattccaacggattttaaactttcctctactctctgccagatctcatctgtcggcacaccgatattttccggtccaaatccgacatcttcctctacgacgctggcaatgatctgattatccggattctgaaacaccattccggcagttttgcgcaccggtaaaatattttcttcctgcgtcacatcttttccatccacccagagacttccctctgtcggagccagcaatgcgttgatatgttttgccagtgttgatttgccggaaccattatgtcctaagattgcaatgaactgtcccggctgcacatcaagatcaacatgatctaatgctgtctggatagattccacattgccttcttcatccctgcgaatatattcatgcacaagctgttttgctttgatgattcccattccacgtgttcctctctgtctgtttcctgttcgtttctaagctgtttcttatatatgttaatcttcccacttcagcctgtgaagctgaccttctaacttcatatggtcaaactgattctgtctgagtgcttcatataaaacgattgcaaccgaatttgccagattcaaagatcttgtctcaccgatcatcggaatacgcacacacgtatccgggttggcttttaagatttcttccgggattccggcgctttccttgccaaacataataaagcagtccggttcataggaaacatccgaatacacatgtctgcccttggtcgttgccatataaattttcgcatttggatttttttcacagaaatcatcccagtttacataagttgtaacatctaaatctttccagtaatccattcctgctctttttaacgctttttcttccaggctgaatccaagaggttcgatcagatgcagtctggtacctgttgccacgcaggttcttccgatatttcctgtatttgcaggaatctctggctcatataatacaatgtttaattccgccattgtttttctcctgtccggcaaaagtttttctaaaaagaaaactttcccgccgtttatttttcgttgcgcagttcctgaataaaaatctccatacggtctaacgctttctttaaatcttcaagtgagtacgcatatgaaatacgcagataaccctcgccgcagtcaccaaacgcggttcccggcacaacagctactttctgcgaattcaaaagttttgttgcaaactcctcggaagtcatgccaaattccttaatgcatgggaacacataaaacgccccaaatggttcaaaacaggacaagcccatttccttaaaacggtgcatcagatagcggcgtctgccattatactcctcacgcatttttgcaacatcctcatcaccattccgaagcgcctcaactgctgcatactggctggtagtcggtgcgcacatgattgcaaactgatgaatctttaacatctgcttaatgatcacttccggtccgcacgcatatcctaatctccagccagtcatggcataagacttggaaaatccattgatcagaatggtacgctccttcattcccggaagggatgcaatcgtaacatgattgtctgtatatgtcagttcagaataaatctcatcactgagcacgaacagatcgtgttttttcaccacctctgccactttttccagatcttccttctccatgattgctccggtcgggttgtttggaaatggaagtactaataattttgtcttcggtgtaatagctgcctctaattcttccggtgtgagtcggaaattattttcagccttaagttcaatgatcaccggtgttccatttgcaagcacacagcatggcagataggatacatagcttggctgtgggatcagaacttcatctcccggatcaagcatcgcgcgcatggcaatatcaattgcctcgctaccgcccactgtcaccatgatctcattattataatcataggaaacaccaaaacgtcttgttaaatatttatcaatttctatttttaattctttcaaaccagcattggaagtgtaaaaagttcttcctttttccagcgaataaataccctcatcacggatatgccacggcgtatcaaaatcaggttctccgacaccaagagagattgcgtctttcatctcatggacaatatcaaaaaacttacggattccggacggctggatcgttgtgattgttttgcttaacggattcctcatattacatctctaccctttcgtcttttgactgttctgccataacagttccatgatctttatattttttcaaaataaagtttgtctttgtgcttaaaacagaatctaatggagataatttgtcagaaacaaactgtgaaacctcacgaagtgtttttccctcgatcgttaccataaagtcaaatccaccggagatcagatatacggaatttacttccggataattgtagatacgctcagccactttatcaaatcccatgccgcgctgtggtgtcacacggacctcgatcagtgctgttactttttcaattcctgctttatcccagtcgatcagtgtatgatagccacagataatatgttcttcttccattttctgaagctcgttgacaacggatgcctcatccacgccaagaataatggcaagctcttttaaatcaattctgctgtttttctctataaatgttaaaattttttcacgcataatatgcactccttctttcttttattaccttccgattactttatataactcatccgtctttggtggttctaagaatcttctttcgtcctcattcaacagaacgcggtcatttcccgcggttgcttttccgataatggttgctttgatccctgctttttccagttcgcgcacgagatgattgccgtcctgtgccgccattaacatgcagccgctggagatcaaaagatatggatttactccgaaaaattcacaaacctctaccgtctcctgacggattggtattttctttaagtcgatttcaagtccgacgccagatgcttctgccatttcccacagagctccgaaaattccgccctctgtcacgtcatgcattgcactaacgccagacgtcacggcgactgcggcctcagattgtacggaaatatatgcatccaacgcttttgctttctcgataaatggcactgcaaaatgcgtctttaattcttcttctttctcttttgcaataatggatgtaccctcgattccgatccacttgctgactaaaatatccatgccaggtttcgcacccgctgtcgagatcagatgaccttttttgacttttccgacaccacagacactgataaccggctggttgactactcttgtaacctcggtatgaccgcccattacctgcacgtttgcttttgcacaggcttcctccacctgcttcatcatcaggcagagatcctgctcacagacagaagttggcaaaagtacggtaagcagcacgccaaccggttctgctccggcacttgcaagatcattcacagtgatctggattgcgagtgtgccaatgtcttttgccgttccggtaatcgggtctgttgacattacaagcgtctcatcctccgcaagctgcactgccgcgcagtcttctccgactccggctcctaagaccacttccggtctcattgtatgaatttgtttaaaaacagaacgtttcagcacgttctccggtacttttccaactttcataatcttttctctactgtccttctgtcgtcgtattttctgtaatctggctctcatccaccgttccgaggattgcagacgcttctgctgagctgtccgcaggtgcctccgccggagcttctgccggtgtctgtcctgctccgctgtactgtgccaccgtcgcatatatggtcgcctcatctccggttgccaatgccgcattgacagccgccgttgcattcggatctgccgacgctgttccaacattcacaatcttcggagatgacttgtaagtactcttgttgatcgcatcacggctctgctccatgccatcaactgttacgatcttccacagtctcgccacataacccatatgcttgctctgggttgtggagattgcaccgattgcatctgcggttgctacaaactgtgtgcccggatcttcctcagacacaacttcactctcgtaagttactttacggtttgacggtcttgtttcctgaccgtaaatgttaaaataaaggtcttttccaactgtatatccttcaatataaattggggcctccagattatttacaaactttaaatctttgtaatcgccggcgattgccgcatccatggacggttttacataagtaacgatcatggaatggttcgaacgctgcgtcacttccagttcggcttttaatactgcattgtataaggttgtcgatacctggcagactccaccgccataagactgaacggtctggccattctcataggcgcctgcaagctcatatccgcctgctgctgtcagtggtccgatcgtctgtccaaccgaaaattcctctcccggatataaaacggttccattgatctttcctgctgccacgctgatattcgtgcagcgcgctgccgaagatgtactgtaattggttgtataactgcccagcaaatcttttactttggctaattcttcctttgttccttccggctcaaccacctctgccacaagatctatggaagcgtctgtgccgtcccagttgtttttcagataatctttgatcacggcaagagatttttccacattgacttccactccggagcttccctcgataaactgaaactgcccattttcacggatcagtccgttattgaccgcatcgttgttgagtttttctgcttttgcagtcagtacttccttcgcttctgcctcattgacacctaacggaagttcaaatactttgctgccgtattccagatcttttttatctttataccgtttgataagatttccggtttttccaactgcaagtgcttcctctaccgcgctggtatcctgaaacgcaataccaagctcctgcgcactcacttccacactctttccattggcattcagcgtaaaaacagcttcatccacgctctgcgcatatgcactgacagcggctttcgcctcgtctgctgtcataccgccaacgtagacatttccgatataaacaccatcggcaattttgttgtcttctgtctctgcctttacgatcgcactgtttcctgtaaaaccaatgcataacacagtcacagcgaacagtggaatccatttcatccattttttcaaacttttattcatatctggtctctttctcttttctttacaccgcagtgcaagcccgacaaatcacagatttttcgggctgacgggcattcgccctatcattcaattaaaatatcatctttttgtgccagcacaactgatgatattttaatctcatgacactgctcattgcttatgcacattttatcctattatgagaatgtttttcaaggtgcataaccacgaatatcgttgactgccccttggaattttagtatattttacatgaaagcagcgagcacagttgtgataagcattgtagcgaccacaacgataacgattgctgccattaatttttgattttttttcttaccaaaattatacatagaattacctctttctatcatgaatttatacaaaagaaaggacatgtatcatgagatttccattcttaggactttttatcatttttatctctgttgctgcattttaccgcaaacggggaactgcacaacaaaaggaagctgctgaaaacttctggaaccgcgaggacaaagccaatcaggtccgccgtaaagatatcagtaatcttccctatattaacatacccttggaaaaatttccaataggtatctctgatgatgaagaattaattgattacgagaatgatctgaaagcacttgccacaaaaaagattttaaatttaagccaccagagcaacaccgacttaaaacttgcctacggtcctgccaatcttccggctttatctgaatatgaccagaattatacagcgcttttgcgaagtattgtcgcctacgcaggctgtctggtcaaaaatggttttgagacagaagctgttccggtactggaatttgggatttccattgattctgatatccgcgctaattacacgcttttagccgatatttataaaaaacagggggacacttctaagatcaatgaattgatcaccagagcatcctcccttgattctatgatgaaatcttctattttagagcagctgacattatgattctttttttattttcccataccgggcgatgagctggtcggtaagccttgacacttcgcttcgggtaacctcctctgaaagttccggcatcgggatctggtgaaagtccacgaactgtttcagatatttcatctgctgtggtgtcgccaaagactgctttttcaccttatattgcaacggatatggttgaaatgcttccggcattttctctgcatataagttctgcagctgttcaaatatctgctgcgtttccagcacatcatctaatgcgcggtgcgcatgcacacgctcgattttaaaatattcacacaggctcgcaagatcttttttctgttcttccggcaaaaattttcttgcaagctttaaggtatccaccgcattccgctcaaatgactgcttgtgattcactgcccactgtttcaaaaaactgtagtcaaaaatcacattctgtcccactaaaatatcctctccgataaacgcaaagaacgcgccaagcgtggcatccatttccttgccctgttccgccatttcattcgtaatacctgtaagtgaaaccactttttccgataatttccgttttggattgatgacttccgaaaaagtatccgtcacgacatttccgcgcacccgtgctgcaccgacttccagaatacggtctgtcttaacatttaatcctgtcatttccagatcaatgactacataatcagttaacataactctatccttcccgtcttttctacgcttctgctgcaccagctgccaaaacttctgtcacacacgcctgatgatctaacggatctctgttttcatagtcaaacagcatatacaccggtttttcgaggcgctttggcacttcctgtaatgcttttttgcttttttccgggaagcggtaatggaatggctccaagtgagattttgcaccatttttgcagtaatatctcgtctgctctttaaattctgccggtgatggtgcccaggaaggtctgctcttacaattttcacggtaatacagatcaaatgtcaggctttcttctaacatctgcatcactgcgtcgctgctttttctttctctcataaactcaagcaggatctcagctctgcggattctcgaatggctcatgccaaaatatccctttgcctcataaaaagcacctaattcctgaaacatcataaatgcactgtcaaatagcggttctaacactttcatggtgatctcaaactgcccgctgttgtaataaacctcaagcatttcttccacctgcttgatttttaatacatcatcaaagctgagccattttgttttcatcacttcgtatggtgttttttcgtgataaacaatctcatattccgctgcatgcccgtacatataagaaccttttaacaccttcaaaaatccaagctgtaactgattcggtttcagttcataaatctcgtcaaaagattttgcaaaagcagcatagtcctcatacggaagtccggcgatcagatccagatgttcgtggatatttccgccgctctggatttttcttacaatgtctttcaaaagttccagcttcatcgtccggtggatttcccggattgtcggctcgttcgtagactgcacgccaatctctaactggatcagtcccggccgcatatcatggatcagcgctaattcttcctcatttaaaagatccgctgatatttcaaaatggaaattggtaatgccgttgtcatgctcttttacaaatctccagatttccattgcgtgatcatgcttgcagttgaaagtgcggtctacaaattttacctgtggcaccttcttttcaataaagaatgcaagttcttttttcacaagctctgtatcccggaaacgcagctttttatcaatcgaagacagacaatagctgcagttaaacgggcagccgcggcttgactcataataaataatacggttttcaaaattttcaatatgatcgtagcagaatggaatatccgacatattcatcggttcctgtggctgtgtaaaaatcacttctccgctgacagaatctttgtatgcgattccgttcagttcctttagtgtgccattttggtttacataatattcacacagttgttgaaatgtacgctcgccttcgccgatcatcacacctgtcacctgtggatgttcttccagaaatgtttctacctcataggacacttccggtccgcccacccagattggcacttccggacacagtttgtgatactccgtgatcagctcctcgacataccctatgttccagatataacaggaaaaacagaggacgtccggctttgctttatagatttgttctaaaatataatcgactctattgttgatcgtatattccccgatctcaatctgttcctgaaatgccttggcgtaggcttttaagctgtaaaccgccagattcgaatgaatatactttgcgttgatcgctgttaaaaatattttcatggtttgtttcttcctacatcatcgcataccggaaaactacatcaaatccggcgatccaaagtaaaatcgcaccgcctgcataagctttcgtcttatgctcaaagccgaagtgatatcctgtataagcacctgtgatcaccacacctatcgtcaggcagacgatcatgatcaaaatgaccattaaatttgtttccagaaagccaaatgcaattccggtgagaagtgtgtaaatacttgtcacggctgccatacgaaagaaccgtttgaagccaagattttcctctctgcgctcattgactctctcgttcttgattgcttttgcgatcagtctgacacccaggcagaaaaaaataaccgctgcgatcacggttccgataaaccgctcgttttttgccagattattcgcataaagcagccttgcaagcaggtttcccacgtacagtgctgcaagctgccagactgcgatcagtccgcatacaagtgtcagatgttttttatctatttttgccacaagtgatccctgacattccatacccgcaaaaatatccagcgatatgcctacaagaatcaacagattttctatccagttcatgaatcctcccgtttctgcctctctacccggcagacgtttcctaataatatttctaatttatcattataacgtctttctgccacatttccatagacaatgcttagcgaatgtctgttgttttttatagatccgtcacatccttgactttatggaactatcgcatcacaatttcgcctgaaagaaaaaatgccgcaccttatgtgcggcaatattacatctctgcaataatatcatccatggatcgtttgataatataatcgtaaatctctgccagttctttcgccgagatcgtcattccagactgaatccatgtgatcacaacataacacatcgactgtgcataatactctgcgatacgctttggtgtgagccaggaatacttctgttttttcccggtattggcacggtcgatcacgttcaaaaggatcttttccacgcagctttttgcaatctcctcaaaagagttctgcccttctaaccggatagcgcgcgtgtaaaaatctttatctttttcaatgttggtaaagagaagtaccaagccttcattgatcattccattctggatcaatggttcgatcggattgagcagatccgtcgtgatgatccactccagcaattcatacttatcctgaaaatgattgtaaaacgtcggacggataacccccgccagatctgtgatctctttaattgtgatcttctcaattggatgcttcttggcaagctctttaaagctctccgcaagaagtgtatcaatcgcactctttccctgtcctgtcataattacctcatgtttaatgtattactattttcgaaataataatgcttcttgcattcggatcatcacgaagattcaacacctcgcctgtttcaatgatcttaacaatcggtcttaagaaaaaccgttcaaaattatgcgcaactacgccgtgcattccattcgataattctacttcacatcccaccggatacactgcaatcttctcaacaaacaattccacgatctttggatcaaacagactgcctgaccctgccattagatattccactgcttcggccggcgaaatctcctctctctgccgatgcacagacaccatatcatcatactgatcgatcagccggataattcttgcatataacggaatctgatccccgcttttttccagaggactgccgcttccgtcatagttctcatgatgctgctgcacactggcatacaccagtgctgaaaaatgataattgctccgcagataatctgcaccgagttttggatgctgatttaaaagcttctgttcctcctccgacaatgaatgatctccattgacaatcccgatatcaacgaacctcttgccgatatcatgaaggattgctgctgtcgtaagctgataaagctgttcctcgctcaatccataccgggcgcctaccattgctgacatcatggcaacattgatagaatgataatagatgtagtcatcatagttttttatatctaacacattgcacataatatcgccattgcttaaaatattctctacaatgcgctcgatcatcttttgtattttaatctcgctgaccggcacatctgccgcacctgacttcatgtcaaacgcaaacaaatcatgcacaacgctcagcgcctggcttttcacttgtggattcaaaatctgctgaatctcaatgccgcgtgtaaattcatcatcaatgtatattcctggaaaccctaaaaattcaagatttgaaatatattctgccgagagaagtaaatgttttgcaagtaacagtctgccagctccgtcgtatatatcctgaccaagggccattccaggcgtcagtttactcgttggtaaataacgcatgtatgcttcctttcaatttcaaaagaatgtttctattctatctcatttattcatcaaattcaactgttacaaaatatcccttttctgtttccttcacatctacaacctttccttctttggattttatcctgttaccaaccggataattggcagacatcgcatatgcttttcctaatgtataataatatgagttcggtaattttccttctgtgattggaatgacctgccctatctctaccagacctgtgcgttccattttaaattcttcctgtctcatactccgcctccaaataaaacacatataatttttatgtgccatacatgcaatattatagtataataaaagagcattcacaagagatacggattaatttgcataaaatttaacaatgctccagctctttcgatccgctcattagaatcgccattcttatatgtattaaggagttttatgaaagaaaaagaagaaatttgggactattttgtatcaaccgttatcaacacgttaaatgctgatgaaatctacgatgccacgatgcaggcattatccgatctgctctgtccggacgggcttttactgatgatgaaccagaatacacggcatattttttctatcatccgaaaatatggtgatatcgcctataccaaaccatacagtgttccaacagaatccatgttagaagaattaaatgacgctccaaacctgaccatactcgacgaaaatgcctctcatattctctcgcttatgacggcgagacagcgggaatggctgtcagtagaaaacatcactgcgatctataccttaaagtataatcgtgtgatcatcggttttctgtatattgcaaatggacaacagcgccccctgacacctgatgagtcaaaatatctgcaaaaaatctgctactatttttcctatgcgctgcgcaatgccaatttataccagaatgcctaccgtgcttccattacagacgagctcacttccctgtttaaccgtaagcatgcgtttgagtgtattgacaatgtgtgccagcaccagaagccgtccacgctgatcgtgcttgatatcgacgatttcaaattatacaacgaattatacggggcacaggaaggcgataacctgatccaccgttttgcacagatcattcttcaggagatcacctcagacgatattggtttccgctttggtgctgatgaatttattattttaaaagaagggactgatgtggaggaggcaaaagattactgcaaacggattgtaaatggtattgtcgaggtctctcctgccaatacagtctgggacatatctgtctcttgtggaatttctgttttcccggatatttctaccgatgcgatgtcttttttacataatgcgacgcaggctgtctattatggaaaacaggctggaaaaggaaaaatagaagtttatcgtcatggaatggacgagcgttcccatgacccagatatccgcactgcatatgaacgtgtcgcaccgacaatttatgcccttacggctgcgatcgacgccaaagacagttacacttttattcactctatgaatgtatccaaatacgctgtgattctcgccgaatccctcgacatgaattccaacgacatagagattatccgtgatgccggtcttttgcacgacattggaaagatcagtattcctgaacgtattcttcagaaaacgtcgcggctcactgacgaagaatacgccattatgaaaacgcatgtggaaaattcaactaaaatgatccgctatctgccggacatggactatgtgattcctgccgttgtcggtcatcatgaacgctacgacggcactggctatccgcgcggacttgccggacagaatattccttatatggcaaggattcttacgattgcagactgtttcgacgccatgactgccaaacgtccttataagcaggcactttccgtcgattatgcagtcaatgaactggaaaaaaacagtgggacacagtttgatccggtgctggtcaaacagtttattgaactgatccatgaagggaaaatatcaattacatgacaggagcactcctatgaaaaaaatttttcttttttctctctctttagctctcccgcttttatgcggatgtgcaaatgacaaattagccaacggctgcaaagtcactgactttgatgatgaaaaagtaactatggattatattgattttctaacagattatgaaggatatctggataatgtcgaagtcttagatgatatttatgccaagcaggattatgaccaagatcaaaaaccggatagagtcctacaatactttatggatgatggtgaaaaaatgtatgccctatgctttggaaatggaaaaattctcgaaattggtccatttgaagataccatgatgcagataaacttgtatgcgtccgacctaactggtgacggtaaaaacgagattattttctatggttttcattcctactccgactatccttatgaaaacagtgaaattgccattttggcaccgaccagaaataaatataaactgctgccgataacaatttcagaagaaaatgacagctataaagccggatatcctgtttttatcgaaaaaacagataaagagtatgaaatccttattacatgtgaggaacttggattagcagaaaaatatcaaatttccaaacatgaccagaaaacattcggcgactattattccgatttacaaaatggcgaaaaatttctttcttcttcaactgcatggaatatttcaattgaagaaggaactccttctaccctaaccttgtatgaagatattttataccgcctgaatactacccttaaaattgaaatgaagtggaatgggaatcaatttgaggtactaaagacttctattcttgatgaacgtccatgatattcaacattcccacattaccctatttctttcttatataaatttccaaacccaaaataagtttggaaatttatatagaaatgataatgttttatactacttgcattgcaaattaataccctggcaaataatcaaagaatgtatttccccctattgcctttattgtggatgtatcaattccggttattcctgccgaactaaaagaactactcgcacgatgatacttctgtcctcccaataaagaagatggaacagccccagcaaccagttcacttgctcttgctacgcaattgtcccaatacctattctttgtcggtttcattgcatgtttacaatgttcttcgctaccagttgcaacgttatactcagctgatttgaaaataatatttttccacgtccaattcaccttgtctcttgcaaaacgttttggatttccgctcatttttctattccaaatttctttagccactgcatattcccccgctacatttacggtgtcctcagcataaattactcttgccaaacaatcaatttcagatatattggaatcactccacgcattctgccactgactgtatgttaatggttctccatatgtactcatatttttttcgctccttttatttaattgataatcgattatctaacatataaaaagagttatatatcaaatttgtaaacacaattttttaaaataataatattttttcaaacttggagtaaagatatgttttctttcacaagtcaaacgcaatgtaaaaataaaagaaaaactatacaaacaaatatgattttctttcatttacactgagaataacttgtaaaagttccctgacacataccaagcatgaaattattaatctaagccttgccattcacattccgctacgcttcatgctcacatcgagctatataaatgttatctgctacgctttgtaataaaactgtatatgtcacaggaaataacaggaatgaaaaatgtcgaaagttgcaaaaatcctttctaaatgttatatattttattgattaagagatggaaaaacgttctcaggaaatcagacctttcagaaaggctggcaggaaacgaggggaactattgcaggaagacaaggaaattgtaagtaacagttaaataaatgcaaatggaggcaatctactatgaaaaagaaaataattatattattatccgctatggcaattctttttgcaggcatcgctatttggtataatacgccaatcgacttgatggatttagaccataatgaagttatggaaatcgttgttttcaatggcaatagtgggaatacaacacatattaaggataaagagcaaatacaacatattattgctaatttgaatgatgtcgaagtaaaacgggcaaaattatcggttggatattctgggtatagcttcaaagtaactatttatctatctgacggcaatgaagcagatgattggaacaattttattatcaattcagatgatagcattagaaaagatccttttttctattctgtgacaaaaggaaaaatagattacaactatatagaggatattgtcgaataatgtgaactccaatatatagtatggaagaattgccaagtgccgttctacatatcaagttacgtcagtggcttttgccgcacatgagctggaacagacaaagtggttgttcagaaacttaaagctggtatatatcagtggagcttcacaagttattctcagtgtaaatgaaagaaaaatcgtgcagacgaaatatgatgttcctgttcgcaaagctcacaaaggaaatcatatttgtctgtacgatttttctttttcatctctactctctgcttaaattccggtactgcagcggcgtcatttcaaacgtctttttgaatgtacggttgaaatgctctacattctgatatccaactgcataagaaatattctcaacggtcatatttccgtttttcaataatgttttggcacgtttcattcttgtgtgtgcaacatgctctccaaatgttttgccggatttatctttaatgtatttggaaatgtatggttctgacaaatggaactgctccgccatatcttccaatgtaacagtctgatagttcgtctgaatataattcagcatggaaaccagacggtcatcctgatgattgtcatcttttgtcatctccggaagcttgttaaccgctacaacaagtgcatgaatggatgctttaataatatcttcatccatgcctgcgccccagtaattttttccgtcatgagtgattcctacataagccattgccttggaggaagatccatgggacaatgcatgctcctcataagttgacagttcatatgtgattccaaaatactgtttgatcgtattgctgactgcatccagacgtccattaccatttgcatccacgattgtctttttctcgccatactggatcgttgcttctgccatgatgccgtcatcctgacggaaatggcattcggaaatctggaagtatggtgtatagtgaatgtagttatcctcaaaaatctcatatacccactgtggtgaaagctctttgtgctcctcgtctgatacctgttttacagcatagccaacttcctcacgcattttctccggtacagaaatagagaagttctgtttcaaaatgtaactgattccacctttaccggactggctgttgattcggatcacgtcagaatcgtaagttcttccgacatccaccggatcaattggaagatatggaacggtccaggtagtgagtttcttttcttctctccatgccattcctttggcgatcgcatcctgatgagaaccggagaacgcagagaatacaagatttcctgcatatggctgacgatcatttacctgcattcttgtcagacgctcatacacttcacggatatgcggcatattggaaaaatcaagttttggatcaataccgtaagagtacatgttcattgccactgtgataatgtctacattaccggtacgctctccgtttccaaacaaagttccctcgattcggtctgcaccggcgagcaatccaagttctgcgtcgctgacgccacatcctctgtcattgtgtggatgaagacttaaaacaacattatcacgatattttaaatttttgctgacatattcgatctgggttgcaaacacatgtggcattgctgtttccacagtcgccgggatgttgatgattgccttgttttttgcggacggctgccatacatcaagtaccgcgttgcagacttccactgcatactctacttctgtgccgtggaaactctctgggctgtactcaaatgagaaatctccgtctgtctcggctgccagttttttcaataattctgctccgtcaactgcaagctgcttaatctgctctttgctctttttaaacacctgttcccgctgtgcaacggaagtggaattgtaaaggtgaatgacagcatgcggtgcaccttttaccgcctcaaatgttttctttataatatgttctctcgcctgtgtcaaaacctgcactgtcacatcatccggaatcatatcacgctcgatcagggttctcatgaaaataaactctgtctcggatgctgccgggaaaccaacctcgatttccttgaatccgatatctactaacatctggaaaaattccagtttttcatccaggctcatcggttcgatcaatgcctgattaccgtcacgaagatctaccgaacaccagattggtgccttttcgatatggtctttctttgcccagtcatactcacagactggcggcataaaatattgtctttcatatttgtttacgtttttcatgtttattccttcccttaagcgcccatgctgcaccctcgcggagcatttttacattataggatattgcatcacaatttcctctaaagaaaaacctctatgattcatccgaatcatagaggcgaaactaatgcggcatcttattatgtcatattaaatattgcttctcttcatcgttttgcagattatgcatggcggaatctgttgcaattcccggttgcataaaatacatcaacaaatctgatataatattaacacggtgatagagagaataaaatgattaaatttaatctcttttattgatatattttactatatgacataatctgagcagtttttcatttcataatcaacgagatcctgcaatgtcatgtggtctacaacatcattgatcgcttcgttcattttctgccagacaagaactgtggcgcaatcatgaatcttctcacaggtattatcctcttccacacaggcgaccggagcaaggcttccctctgtcagccgaaggatcatgccaatggtgtattcctctggttttttggttaatatgtagccaccctgtgcgccacgaatactttttacatagtttgccttatttaaaacagaaatgatctgctccagatatttatctgaaatctcctgtcttcttgcaatgtccttcaggctgattggttcacctgtattgttcactgcaagatctaacattaatcttaaagcatatcttccttttgttgatactttcataaaataatccttcccttataagccgtttcacattttctgtaaaaacatactgacttctgaaaatcattagattcagtatatccccctattcatactatgtcaataggaattaagtcatatcattgcttgtatcatggaaaaaacagcctgtcaaaaaaataacgagtgattttccttgaaatagcgctcccacagtgatagaattttaacttgcgtgtttatatttttttaataattattttatacattttttactgaaaggataaatcatcatatgaatgaactaaggccaaaactttttgatgtcatgaaaggttacaccaaagagcagctcatcaaggatattatttccggtattattgttgcgatcattgctctcccgctttccattgcgcttgcaatcgcttccggtgtgggacctgaacagggactttacactgcgatcattgccggatttttcatttcatttttcggcggaagccgcgtccagatcggcggtccgaccgcagcatttgttgtcatcatctacggaattgtggaagaatatggtactgacggactgattgttgcgacaatcctcgccggaattattctgataattatgggaatctgccgtttcggctccctcatcaagtatattccttatacaattaccaccggttttacctgtggtattgcagtaactttatttgtaggacagttaaaagactttttcggtcttgagattgcgtccgttccttctgaatttttaaataaaatcgctgcctatattgaaaatattagtaccattaaccttaccgccacagtgatcggttttgttgcagtcatcattatgctgctctggccaaaggtgacagataaaattccgggttctctcgttgcgatcattatcacaaccgcgatcgtgtattttgcgaaacttccggtcaataccattggaagcgtttacggcgaattaaattctgcttttccaagcttccacgcacctgccctctccatgaaactggtacagcagatgctctccccggcttttacgattgccattctcgccggtatcgaatccctgctttccgcagtggtatcagacggtatgatcggtgatacacataaatccaatgccgagctgatcggtcagggacttggaaatattttttcaggactttttggtggtattccagccactggcgcaattgccagaactgctgccaacgtccgaaacggtggacgcacaccaattgccggtattatgcactgtatcactttgactattattcttctgtttttaatgccgcttgctgcattgattccaatgacaactttagccgctgttcttctcatggttgctgcaaatatggcagactggtcttccttcttccgtctttgcaaaaccgcgccaaaaagcgatattattgttttagttgccacatttttcttaaccgtattttttgatctggtcgttgcaattgaaatcggcgttgtacttgctgcccttttatttatgaaacgtatggctgaaacagccgacatcaaagcctggaagtacacggattcccctgacatcacaccgggcgaggcagaaaaactccgtgatattccgcactctatcagcgtattcgagatttgcggtccaatgtttttcgctgcggcagaccagattgtaaatatcaacagtcatcaccacaccaaagtcgttgtcatccgtatgcgaagcgttcctgccattgatgcaagtgcaatgcactctttgcatgaacttgccacacgcgcgaaacgcaagaatattacgctggtgttctcacatgtcaatgagcagccaatgcatgttatggaaaaggacggatttgtggaacttatcggaaaagagaatttccataaaaatatcgtcgatgcactggattacgcagaaagtcttgtgaagtaaatatttaaaaaaaccgtacaaacaaatatgatgttcctgttcgcatagctcacaaaggaaatcatatttgtttgtacggtttttctttttatttacacagtgactgacttgtgaatatctctgccctgctttacattatgaatgaagccataagatctgccaacattacttagtcaacctccagtttagcttgtcagttccccaggattttttgcaaggttcataatctcctgcaattctgcgccctctaccggtgcatttccatagctgacatgtttggcttcttctgtcactccgccgagcagacgcacatccttctcttttgtcatctcgattgtataataatgcgcctcatcctttaatggattgtatgtaatatagatacgatagcaaagtggtggaaccaaacctttatctggaagatccacgcggatcagtgtcagatcctcggaaatatccagcgccataacggaatagtcatcctctgtgtatggataaagcttcggctctttgaatgctgctgcaaaaagttcattgacaaaagtttctttttcatcgcaaagcttctgtacaaattctgctttctcggcatataagcgttttgggatcaccgaaaactctgtctgatttttcacgaatgcctgaaactgctgtggtgtcatcttgatctgctttggctgttttgccattttctcatctgcctcatgcagtttctggatcagttcaatcttcaataccagattatcggtaaatggattgatgaccattccgcttaaattcaattctggttttacggcaacgctgttgcacgccgggaatggcatgcttaagagtgcctggctttttggtgcatttgccatctgctctttggaggtgtacactacaaaatactgttcgccggcaccgctctttaaaaagcagggagttggctgatccggtgcttttaacattgccggaactaacagtttcgtcggacgaagcagatttaagactgctgtaagcttttcttttgtccggtctgctgcgtaatctttgattgcctcctctaatctatcatttgtgatttccattgttgtcttttcttccataaaaaaatatcctttcctaataacccaatgtctaaaatatcgttcgtaatgattcaatttcacaatatctgacattcgataatttcaattcaaaccatgattattttaacacatcactgcaatttattccattcatttctatccccaatatattgccagattcctacacttgtttgttattgatgcattttcgctgttattctattttttctaataaatccggcaattcgctcaattcataaatgcggtagtctgggtgaatggcgccgtcatctgttatatttcgatctttttgataccagattgtagttagtcccgcattttttccaccaagaatatccgacgaaagactgtcacctaccatgacgctcttctctaatttaaaatcaggaatatgggcgaaacaatagtcgaaaaattttttatccggcttatagaagccgatttttttcgaaataaaaaaatcctcaaaatacggttttatcccggactcctcaatccggcgtttctgtacttcgtaggttccattcgacgctgcgtataatcggtattttccatgcagtttttgtaaaagttccagtgcgccttctactttttcatgctcataagcaagattatgttcgtagcattttgccgtttcttccggcgacgcctgtattccacattcttcaaagaaaatccggtagcggtttatcttcacttccgcatgcgtcagtttgccgagttctaataatttccactgggacagattgatctcgctgtatcttttcagcagcgcctctgtcggctccacaccgattttttgcagtgcttttttcagagcttctttttctgccttatgaaaatcaagaatcgtgtcgtctaaatcaagtaaaattgtagttatcatgtagtttcctcttttattgtcataagctttccgctgataccggaaagccttttaccttttgcaatgatcggcttaagtataatcgacaactctctgattgatccgttcctctgccatcacatgatagtgtttgtaattcttcggatctgctgcaacctcaatcggatctcccggtcgataaacataccctggatctgtccacagattatcactcttgaaacgataggtcagattctgtagtgcatcataatacgagcagtaaatgacatatggactctgtccattcactctcatggatgtgttcagcacaatgtcttcaatcgttgcatgaagtatataaccctttttcaaaatgcgtttttttctcaatttcatgatcaactgataaaacggataactgattccaacaaggaaaaacacaattcccataaaaagcatcatgcgaaatccatagtattcatgtcctttcacagtcagccatgccgggcgcagcggattgaaataaagcgtcagttcctcaccgatatacatgtcagaactgtagctggtaattttctgattctcgtatgtaaccccatcatattcataggtcacaaacacatcatgatccacatctccatccgaatccctgtgtgtctggatgtctgtaatgtatgccgtgatttcctctgctccatccataacactggtttccatgttcaagattgaaaagcttccgatcagcatccccactccgattacagcaaaaaccagaaaaaaaatgattggtattatttttttcataaactctttcccccgctttcttttgtccccttataaatttatttttgtataaaaatacattattttcttaatcataacagaccttttactaaaaagcaaaataaagcagggatattccaagattgcaggacacacattgtgtacccctgttttctggaatgatatccctgcttattaagattccttttacaaaacaaccccgtccttaaaaatggaaatacttctgtatccacgtttctcagtctgtgtttcttttccattggcaacttcgatcaccagctgcaacagacgttttgctgcgtcgtcaatggattctccttcaacgatcgaacctgcatcaaaatcgatccatccttttttattttccgcaagccggctgttcgtggacagcttcaatgtcggagccggcgctccgaatggtgtaccgcgtcctgttgtgaacaggatcaggtgcgctcctgctgctgtcatcgccgttgctgatacaagatcgtttccaggtccataaagcatatttaatccctttgtcacaacagcgtccccatatccgatcacatccatgatcggggctgtaccgcctttttgtacgcagccgcaggacttgtcttcgagcgttgtaataccaccctggcggtttcccgggcttgggttgtcgtatacgacctcgttgtggcttataaaataatttttgaatccgttgatcatactgacagctttttcaaacaccgcttgattaatacagcggttcattaaaaatccctctgcaccaaacatttccggtacttctgtcagaactgtggaaccgcctcttgccacaagcatatcgctgaaacggcctactgccgggtttgccgtgataccggaaagtccgtcagaaccgccgcatttcatcccgactacaagctcgctcaccgggatcggttccctgtggaactgtccggcataggctgcacattcttccaataattttcttccggcttcaaattcatcctccacttcctggcaggttaagaatttgactctgtccgcatcataatcgcccagttcctccacgaactgttcatgtgtcagattctcacatccaagtcccaatacaagtactgctgctgcattgggatggcgcacaagcgccgccagaagctttctggtctgtgcatggtcatgtcccgtctggctgcatccaaatggatgatcaaatgtatacagaccgtctatcgttccggtcacgagatcctgattgagtgctgtcattctcttagcaacgtcattgacacaccctacggtcggaatgacccagatctcattccggatcgctgcacgtccgtctttcctgcggaatccgttaaaacactccggtttttctgatgccggctgcttaagttccggatgataggaatattcaatttcaccggacagattcgtcgccatgttatgcgtatgtacccagcttcctgccggaatgtctgtcgttgcatgtccgatcacaaagccatatttgataatattctcttcttttgcaatatttttcaaagcgatcttatgtccctgcgggattgcctctgtcaccacgacctgactcagatcgccggactgtacggtctctcctgcattgatcgggcagagtgcaactgccacattatccgccggtgctatctgtatcgtcttcataagcatttacaggcagcctgcataagcagcctttgctccttccctacgtattttctcaagatcctctgtgaccgctttctctaatccttcgattccggtcagatcctgatcccacatttttttatttgtaagcacttcatgcaccagttccgccgcagatgcatcccggtgttcataataaaattccagcacccatctgtcatcacttacggtatattcgtttcctgccggacatctgcagatgagtcccgcatctgtcaattcctgaatgtcattgctgtaaaaggcgatataggcagccagagacattgtcaggcacacaggaagttttccctgttctttgatatattccaaaaaagaaggcatgttgcgcgctttccattttgatgttgaatttaaagagatactcatcaattcatgatttacaaatggattgttaaatctgtctgaaactgctgctgcaaatttcagcagatcgtctttatctaatggaagtgtcggaatcacctcctcataaagcattttgttcataaaacctttgatgacgtcgtcatgcatgcagtcacgcacaatattttctcctgcgagatatgcgccaagcacgaatccggtgtgcgctccgttcaaaatgcgcacctttctctttttatatggactcatatccggcacaacaaatactttatcggaaagtcctgcctttttgaaaggaaggacatcatttaacttttcatcaccttcgatgacccatacgccaaatacttctccgacatccaataacggatctgtgtaaccatgtttttgttctaactccgctacctctttctcatcacggatgcgtcccggcacgatacggtcaacaagagagccgcagaaagtacagtcctcattgacatattttttaaatccgtcctcaagtccccactgttcgatgtactggttgacacattttaacagctcttttccattgttgtcgatcagctcgcaggctaacatgatgatccctttttttcctgcctgataacgatggtacagcacctgtgtcagttttgccgggaaacttgatggtgggcagtcatcttttttgcaggaagggtcatactggattcccgcttctgttgtattggaaacgatgatctcaagttcatcgctggctgctaattccatcattgcctcgtagcctgctttttcatatgggtttaagcagcggctcacgctggagatcacacgcttgtcatccactttctgaccgttttcacttccacgcagatataacgtgtagagtccttcctgctcattgatcatgtcgctcagcccctgtgcgatcggctggacgaggcagcattttccattccagtccgctttttcatttgcaaggtcgaaccagtaatcaacaaacgcacgcaggaaatttccctctccaaactgcatcactttttccggtgcttctttcagaagatatccgtcatagccagctttttttattacatcataatttaatttttccattatttattccctttcttttttatcactgatatggaaaatggactgcacatgtttatgtggcagccgcattttctatttaaactaataaactaaatttacaagaaatgttgtaaatggctcaaaccatgtgaggagcaacaggtttacgatcagcagaatgtagaatggaactgcttccttaataaacgctgccgtcttacattttgtgatggaacaggttacgaacatcaatgttcccataggtggtgaaagtgctccgatcgcattgttaaagatgtagatcattgcaaactggatctcgttaatgccatatgcttttgcaatcggtgcaagcaatggaacaagaatgatcatggaagcatttccctcgataaacattccgacgatcagaaggaaaatattcacaacgatcaggaatacaaatttactgtgaatgtttgcaagcatccatgcagtcagcgcctgtggaatctgctcttttgtcaggatccatgagaatacagatgctgcggaaacgatcagcataatggacgttgttgtgcaggcagtctcttttaacccctgaatcatgtctttgatatgcatctctttataaaggaagccaagaaaagctgcgtaaatgatagcaactgctcctgcctctgttgcagtgaacacaccaattctgatacctccaatgataatgatcggaagtaaaagcggtaaaattgcaggtttaaatgccttccagaagcgtaaccatgtcattttctctgtggaaatgttaccatatccacgtttttttgagataaccccgactaatatcatcatggtgatgcagagcaatgccccaaccccaagacctgacataaacagttttccgatggatacgtttgcaatacatccgtagaggatcattgcgattcctggcgggatcaacggtgtgatcattgaggacgctgctgtcacaacactggaaaattcaagggaaaatcctttttttgtcatttccggaaccatcattttggattccattgcggcatccgcaatattagaacctgacagacctcccatgactgttgagagaaggacattgacctgtgcaagtccacccggaagcctgcctgtcacaacctcacagaaatccatgatccttttcgtgacaccggtgtaattcataaaaattccggcgcagacaaaaaacgggattgccagcagtgaaattttttcagttccgataatcgtctgctgtgcaaacactgctgcactcacatgcgggttcagtgcaaaatacaccatagagccgcccaatactgccaaatatacaggcaccttcaaaaataaaagtaccaacattacgattgctgccaataaaagaatatcactcatcgctgcctgctgcctcctttgcctctgatttgacgccatgaagtatgctgtaaataaaactgatcaccatatccacataggaaaaaagtgaaatgccatacactacaatgtaaggaatatgtaacatactggtggaacgtccactttccagaaatatcttcaaatacggaatggtctgtacaaataggaaacctaatatcacaaccacaataactgcaatcatgatttccattaccttttgtgctttttccggcatgagatccacgatcatctcgatcgcaacgtggttaccgttccggaatgccgcacctgctgccgcaaatgtgatccacaccatacaggatgtctgaacttcctctaaccatgtaaatggtgcatgaaacacataacgccagataaccccggcaaatgttaatatgatcaggatcgccagaatgacagatgctacgataacatctaaattcgctaaaaaactccatttgctctttttcttattttccatgctcatcctctcctattcctctgctcccattgccttgcgcactgtatcgtacagtccgtctgaccatccgaaacggtctcccatctcatagaatggagctgctttttcccggaaaccttccagcacttcctccgatggatcgacaacggtcactccctcgtcgaccatcagctgtaaatacacctgctccgcctcctgcaatacctgattgttgtattcgccagcttcctgtgccgtctcaacaagccagttctgctgttcctctgtgaggctgttaaaccagtcagctgacaccacccatgtagtgaagtttttaacatgtccgtccaggatcagatatggagccacttcatgcagctttcttccatacagggtagcgatcggattctccgcaccatcaattgtctttgtctgcaatgcctgataaacatctcctaatgccataccggtagaggttgctccgaggacatcaaatccatatgactgtatctcattggatggtacgcggatttttaatcctttcagatcatctacactgtttaccggaacattggtaagtgtatggcgttctccatacatccagttggaagcgataatttttaatcctttttcttccagctttttgcactgatcctcataccagtctgattcgatcaatgtccagcactgatcccagtcatcaaagagaaatggtccaaataatattcccatgtccttgatcccataatctgcataaaacgctccgtctgcaagcgtgcataccggctctcccaaaagcatggaatcaatcaaagatgatttatctcccagctgtgaatccgggtacacttcaatcgccatttttccaccggacttttcttttatgatctcctgtgccctctcccatcctgcgccgatcggttcactgctgttattctcaaatgccacatccaatacaatctccggttctacggacgaagctgcatccgatcctgtctggctggcgcttccacaggcagttaaaggcaataacatcaggcctgacagtatcactgctgtcatcttttttaatctcatagtgtaaaacctcctttttctccaaccgtttctgactttttatttgttaataccggaaaaatcaaaaactacttttaacatgtctcccggattgtttgcaaagtctgcaaaagcctttgctgcatcctcaaacggatagacatttgtgatgatcttttccagtggagctttgccctcatgaacaagatctatcaactctaagaagtcttttttcaatgcatttctcgaaccaaatacattcagttcttttttctggatcagtgtgaagttgaaatccagattcttttttccgactccgatcaataccatgcgtccaccgaaacaacatgcatcaatacaattctggaaagtagatggaagtcctacagcctcgatcgtcacatcaaatccatttccccctgtaagctctgccactcctttgtcaaaatgctccggtgaatcattcagcaatgttccgtctacgccgaactcttttgccatttcaagcttaccttcggatacgtctgaaatataaactgttgcgccttttgcttttgctgcgatggctgcaagtacaccgatcgttccggctccgactacaagcactttatctccctctttgacatttgcacggctgacaccatgataactgatacagaacggttcgattgctgctaaggttttcggatccagaccttttccgtcatacactctttctaccggcattgtgatgtactcgcggaaagctccatcccgctggcatcccatggtctgattatccatacatgcatttacgatcccatgtgtgcaggaataacaatgtccgcagttaaaatatggattacaggtaacgatcattcccggtttgatcccatattcattgttctcatctgcctcaatgacttcggctgaaaattcgtgtcccggaattctcggataatcaaaatatgcaaatgttccacggtatgatccaagatcacttccacagattcctccatataaaagttttaataatacttctccttcttttctcaccggcatattgatctccttgatttccacttcgcctggtgcgttgatatacattgctttcatgtgtcatcctcctcttatcctttggtatgctttttatgtttctgtctttgtacttatcgttacatactatgttgtatacatcagattataatatcatgttttttgcatgtcaattgtacatgttgcaaataattctttttcatattttgtgaataatgcataattcgcttttgttgcccctcatcaggcaggcttcgcatttattttggcagctcatttgtgaagctgttgtgtttattttgtccgtatgctagaatgaaaaagaatatttaatattattttcttgtcatgggagtatctgttatgtcaaaaatgaatttaaaaacacaggcttacaatacgatccgccaaaaaatcgtaacctgtgaatatgcaccgggaacttttttaaatgaagaacttctcactactgaattaggtctgagccgcacaccggtccgtgatgcgctaagccgtttagagcaggagggattaattgaaataaaaccaaaaaaaggcattatcgtaatgcctctttccattaatacgatcaatatgatttttgaagtacggcaattatatgagccgtatattcttttaaattatggtaatgccctctctgtggagcggttaaaagatttttataatattttcagttccagtaaaacgaatcataactgttataataataatgattatttttacgaattagatacggaatttcacaacttcgttgtcgatgcgtgcccaaacacttatatccatcaaaactacaatatgatacagacacaggcagaacgtttccgctatatgaccgggaatatttccgagaaacgattagacgacacttttcaggaacatcttgacattatccgggcatgcctgcgcaacgactggcaagaagctgctaaacagatgtcagcacatcttgaggaatcaaaaaaggcaaccttccagcttatttttagcagtacttctgcgcaatcactcacggtataggcaatgttctgcatttttcatagcaacattgcccattttatctatccatatcaggtgtcgcattcacatgatatttcgcttcatggagtttggacaaaaggcacacacactcaacatgtttcgtaaatggaaacatgtcgcaaggctggcactcgacagcctgatacccatgtcttgtgagatattttaaatctctcgcaagagtctccgggttgcatgacacgtagaccacttttttcggtgcaagttttactactgaagataaaaatgcctcatcgcttcccgctctcggtggatccatgaaaacaacatccactttttcgttctgctctgccagctctaccataaattttccggcatctgcattgtagaactgttcatttttgatattgttccgttttgcattgatgaccgcatccttcacagcatcacggtttaactccacgccgatcacttcttttgccttggacgcagcgatcagaccgatcgttccggttccacaatatgcatcgatcactctctcttttccggtcagtcccgcatatgtgatcgctttgttataaatgatctctgtctgtaccggattcacctgataaaatgattttggcgaaatacggaaggtacagccgcagagtgtgtcctcaatatagccttttccgtaaataacggtttccttttctccgagaaccatgctggtctgtttatcatttatgttaaccacaactgtagttatttctggatgaagtttccgcaatgctttcacaaaattgtttttggatggaagaatcggagaaccgagcaccagcactaccatcacctcgccgctgtgaaaaccacggcgcacgagaacgtgccggagcagaccgtatccggtgtcctcatcataagtttttattttaaacgaatgtaaaagtcctctgatatcacggatgatagcgcttgaaagctcatcctcgatttcacaggaatcaatgttgatgacctcatgggttccggccttgtatacaccggaaatcacgccgcccggtgccgcctttgcatgtccgtttcctgcggtacgtctgcctccgtttgcatgttttcccctgcgctccacatcaaacactgcgtgtactttatttctgtaatgatacggattttccattccgatgatcggcaggactttacagtaatccccaatgtttttgcgcacataggtctgtttttcctgcagctgttgttcgtaggacattccctgataatcacagccgccacatttttttgcatacggacagactgctgccggtttctttttttgtttctctgatttccatgcgtattttttctgcaatgctcccgcattatctatgatttttttctttccttttgtctgcatgactgctccttttattttggcttgttacttttcatctctatgtgtttatgctatcataggaacccgtaagaatcaaaatatttttagtgaggttatgaatatgaattttattaagaaaaattggaaaggtgtgctgttatgcctgatgattgcgattccaagctggattttaggaaaatttttcccaattgtaggtggtcctgtctttgcgattctcctaggaatggtcattacattattggtcagcgataaatctgctctacagagcggcatcacatttgtgtccaaaaaaatcctgcaatatgctgttattttacttggttttggaatgaatctctctgtcatcctgcagacaggaaaacaatcgcttccaatcattcttgcaacgatcacaacatcccttgttgttgcctgggtattacataaaatccttcatgttcccggaaaaatctccacactcatcggtgtaggttcctcaatctgcggaggctccgcaattgcagctactgctcctgtcattgacgctgatgatgaggaagttgcacaatcaatttctgtcattttctttttcaatatgcttgccgctttattttttcctatgcttggcaccgttcttggtttttcccagacaagcggagaagctttcggtatttttgccggaactgctgtgaatgacacctcttccgttaccgctgctgcctccacctgggattccatgtacaaccttggttcggctactttggataaagctgtcaccgtaaaacttacaagaacactggcaattattccaatcacgcttgtccttgcttttcttcgaaccagaagggaacaaacagatcataataaagtggattttaaaaagatttttccaatgttcattctctattttataattgcatccattattacaacaatagcagtgaacttcggtgttccagcagctgttttcaatccgctaaaaactttgagcaagtttttcatcgttcttgccatgagtgcaattggtctgaataccaatattgtgaaattagtgaaaacaggagccaaacctttgcttcttggattcagctgctggatcggtattacctgtatgagtttgctgatgcaacacgtattaggtctgtggtaaaattacggatcattttgataggaggaagcggttttcgctccttctatttttgtattctggcaaatagaagcgctatcgccatcagaaaacatcccacaaacacaaagcaccactggattccgattttcgtcaaaaatgctgaggctgacagcgtcagaatctccaccagattcacgcccatattaagcacagacagtgttgccgcgcgctggccgccacactctgtctcgtccacaaactgattttccagatccatcagcaggtattccggaagatttaaaagcaacggcaatatcagcattagaagcagtacggctgccctgaattttaccactccaaaaaaaagaaatgtcacccctgctgtggcagctgtaactgcgggcagttttcccctgccggactttccgttttttccgtcagacaattttcctaaaatgggttctgccagcatctgtacggctgaatagctcaaaatgatcagtgacatccattctaccggcaaaccgcagttttcaagtttttccacgtaaaaaaagttgatcagaagccacgcgatactgaaaatcgccagcgaaatcacaaacagaactgcttttttgtttttaaatatcgctaaaatctgccgtatcgaatccttttcctgctttttctgcatagtatcaccgctattctcctgctgtctgatgtctgcctgaagccgcatttcttttctatctgcaattatggttttactgctttcacttctcaggaaaaacgaacatacaaccgctataatatccatgactacagttataatcagtaaaccttccataccgcttattttataaatcccggcatacgcaactgtactgatgataaaacctgctgttccgaaatttcctgcgtgtgccgtttttgcaagatatccgttttctccatacagagcgtacaaatacgcgcttcccgtcccggaggtaaagcacgccgcaattccctctacaactgcctccacgacgaacagtgcaagtgaccggctcacaaaggctgcaagcaataaacttctcgcaccaagcaataacacctgcgccaaaatcagtgatttccggtatccaattttatctgttataaatcctgttggaatttcccccagaaaaatcacgcctgacaataatgcctgaaggaggaaaaatatgtgttccgacacaccagcctgcgttcttaccagcaacgcaaccggcgcaaaaaagacaagtccattcaaaaaacagactccatcataactatcaacttttaattttttcatgagatatctcctttttttctaattcgtaatcagttgaccgatcttcttttttgtaacccaaaaaaagattacatctgtctgtaacctgatttaaaaactgtgccatctttgatttctgccagtttttccatcattgaattagaaaaatatcaatgtctcatgtatctgataacctccggagtcttacttttaaaatatactgttatttaaaaactgtatcagtgagaaatgttcactgacgtaatttatactaacataacgtatttcaaattacaagtttcagtgcccctctcacttatataccacctctggagctattataacaactctgccatatataacgcaaataaatcattactgttacctttgtttatacgaaagggcaatctcattttcttcatttttgcacgaaaagacagctttatttcttgcaatcctacacgaaaagtctgccataacaagacacatcaggaaacaattgtttcttttcccgatccattccaaataaaggctttcgaccgtgctcttctcgcactgctttaatattttttcatcactttgcagtgttttcaaattctccttccaaccggaaaaatcggaccattttcccggaatcaagtctgtaaaccagcttagatttcgtttgtattcgtaatgaaggatctgaccgtctaatccatatctgctgataaattctgccgcagtcctgttaatcgctttcgacttgtctgtatagagcagactgattttgtcatagcagatttcctgttgattattttctgatgagcctgtctgctggtttccgttgcttccagtttgtgttccggaagctgtctcatcgtttgcagcgttctgacatagcattatattttgtggttcttttacgataccgcgcacagtaagctctcttccgttgtataggatctgctgtccttccacctctgttccaccaaacaactgctccgctaaggatgcacctaggatgtagccctctgtgtcgctttccggcagattttttccccacggaaggacggagtgggaatctccacagagtaacaaaatatccgctttgctgctccgttcgtttatcgtagcacgaactgtctgatttttctgctctgtccacgctgtgaatgtctctgcggatgccgtatcctgccggattgacgctatttcgctctgggtaaacatgtcttccccagactggattgtgatgatattggaaaaatcctctgttttattatgataaacgcatacaaataccaaaaatacagctccaaataatccaaaagccagacttgcgatcctttttctgtaacttatttttttcattgttctgtccttactccgtcatccgcacaacatccccgtttccaaccgtccgatcagaatctgtgatgatctggcagtccgcactcagtgagtttccgcttaccgctgcataactgctgtttttatctaaaatctgcacttccgccttcctcgcgatatactgctctccgagcactgtattttccgtctctaagagtaacacatacgctttgttattttcctgccaaacggctgtaaccggcacaaggtaatcatagctttccgattttcttgtggcagtcatctgtgcgctctcacccggcaagaaaccatccccctgcatagcaattgacacttttatgctgcttccgtctttcgatgtttccagggaaacaatgctgcaatcagacgtttccttaccgacaccggtaatcgttgcattatctcccactgagagatattccctgtttttgctgtccgttgtcgtagtaaaaaaaagtccactctgctcatcgctcatgacaactgccgccgtgtctgttgttttctgcccggtttccacacatacttttgtaataatcccggaggatggtgcagttatctctccgttctgctgctttagggttttcagcttttctaactgtttctggtactgctctaaagaaatggcgttgatttcctgcgtgtgatcaatgtctgcagacagacctgcatcttctaccgcgcgctctgcggctttctttgcatcctctgcagtacttgtattggattccagctgttcctgcttctcctctaatgcgacgctggcagagtcaagtgccgcctgcttttcagtaacttttgcctgaattgtgtcgtatgtgttctgcttttcctgcacagcttcttctaactgctggagcttctgtgttatggttgaatttgtatctttcttttctgcttcgcctgtctgatctgcggtatctttactttgctctgccgcagctgcatccttcacattttgcagttcctctttgactgcattcagctccttctccgcctgtgcgagtgcatccttcgcactgtttaattccttctctgcctgacttttcgcatccgccgctttctgcaatgcctcatttgccttcccatcggaaactgtattcttcgctatcgtttcctcataatcttcctgcgcacgctttaactccagctgctgctttgcgtctgcctgcgctttatttttcttcagggaatcattttcaagctgaagctttttgatctggttctgcagctcataaatctgatcttccagactgtccatatcaagtgaaaaaagagtttctccttccccgatgctttctcccgtatgcacattgacctgtgcaaccagaattccttcctctgtgacaatcgctttctcaccgcctgcctccacggttcccgatgccataaccgtgtgctcgatctttccggatgacggagctgatgccgttacctgtgggacagtgatggatgccaccacccgcgatgcaatcgtgaaaaccagcatgaccgcaagtaaaccagccagcccttttaaccagaaaattcccgattttccggttactgctatttcattttccgaatttttgttttttcttatatttttcatattctcaattacattctgctcctgcactattccttcgctcccgccatcgcaattccctgctccagatagtcctgtcctgccagaaaaacaaacatcgctggcaggatcgtcaccagtgatgcacagagtgaaaatcctgcgttctggctcgtgatctccggcagaaaaagtgacaacggccagagactttttgttttcaaaaacgtcatcggctgctctaacatgctaaaacagtccaaaaacgaaaataccagtgccgacaggatgcccggacttccaagcggtatgccgatccgcaaaaaaatctggaattctcccgccccgtccatacgtgccgcctccatgacattttccggtattccacggaaaaagcggtacataataaagacggaaaacgttgcaaaaattccgggcaaaacgactgactgcggtctgtccagcattcccagacggtttaacaccagatactgcgacaacatcgtgacctgaaacggcatcatcatcacgagaatgaacagccggtaaactgtttttcttccgcggaaagaataccgcgccagcccccacgctgccggcatgccaaaaagcatctgccctgccagaattgcccccgtgtaaaaaatcgagttccagaacatctgaaaatattctggtgaatcgaaaagaagctccacaacattctgcaacgtcgggtattgtggcagaagatgccagatagcaagcccatctccctttccgagtgcaggtgcgatgcacgtatagatttcatggtttcccataaaagtgccgacaagcagaaagagaaccggagcaagacacaagcctgccgccaaaatcagtattcctgttattattattctcttcatgagattcttctttctgtatttatattgtacatcttcctttttatctgctgtctcctgttcattatccttctctctcccagcttcgctcaagtaacagcacaaacaccgcaattacaaacgcgagcatcacagatgccgccgccatcttatccaccgagagcgtctggaaccagttgttgaacacatgctgcaacagataaatattttcctgtggatagctgcccgctgccatgtaaacctcccggaacgccttaaatgaatttaaaaccgacaaaatgacaacggtaaatgccaccgggcggagattcggaagtgtgatatagaaaaacgttttccattttccggctccgtccacctctgccgcctcataaatcccctgtgggattgcggaaagccccgccatccagagcacgatatcataccctaaatatttccagacatagctgaatacgaggattccaaatgcggcatcggtgttcatccagtctacctcctgcaccaacaaaacgtttaaaatctgcccgattccgctcattcctgacagcgcatggatcgcactgttcacaaatccgtggctgtcaaaaagaatcttccacagtacgaccacacttgccgccgggattgccatcggaagcagatacatacttttaagtgccgctgcactgccccggtaaaactgttccatcgtcacatcccagtgttttttctttttttctgccagaatcaaaacctgctgcaacagcattgccaggatcagcgataatagcaacaggcatggaatacaggtgaccacaaaacgcagtgtatttttcgctgcaagattaaacgcatcattttttatcacctgcacgtagttactgatcccgacgaaactgccatccacggtctggaaaaaagagcgccgcaccacatctgcaaatgggatcagtccaaacaccgatactcccagaaattcgggcaacagaaaataccagccaggatttcgcttttttctgattttatgtcttttcatcctcatgcctttctcatagcctgctgcaatctcccatcctcttccttttttactgctgctctgcaagatacagattcactttcttcgtgatctcatttaccgtttcttcgaggttctgctctccttttacatagcttgttccctgttcgatcacaagattctggatcgtgcggtctgtgagtgctgactgctccactgcttccagctgcgctaaaatcgcatctgcttcctcctgtgtcatggagcggtattcaatcgtatagattttgtcgcttccatccctgttaaatgccatgcttgtttccgtccgtcccatcaatgcattgatctgatcctttaaagctgcctcattcaccggaattccgttgctggaagctcctgcctctttgccgagcaatgttttcacaaacgctttccctgcatcctcattgcctccagataccacacctgcctgtaaaaatgggacataagaagaagttccaccattcgacaacaccccataaaccgctccgtccgtcgtaccggcgctcaacatcaactggaaatcctcgacatctgcaatggttccaaattctactttacatgtctctgcaaataaatccatgctgtctaatgttccataacggtatccatcgcacattccgctctcaaaaaaattgccataagattcgatatctctgtgatcatccacatcataaatacgtttcacctgtgtcagataatcggaaactttcgtttcatccagacttccgtcctcctttacccagtttttggaatctacattgtaaaaatcaagcagtaactcttccgccatcttctgctgtaccacataagtcgtacttttgtcttttgccagggtttcgatgcggtctgcaagtgcctgcgtggactttcctgcatctaccgtctgctgatctgacgtgataaatgatactaagaaacgtgtcggaatcgcatatatctttccatcctttgtgctgtctttcacaatggaatccacaagtccatccgaagcctttacctcatccacaacatcactgatatctgttaaaattcctttttccacatagctgtccaccggcattccatctaagataagcacatccggtccatttcctgccaggatatccgtgctcaacgtcttcaatgcgtcctctaacgtcactccattatcatccgtcatgccaatttcaaggtttacataaatatctgcatactcctgacggaaaatattgactgcctgacgcagcgtatcggaatcctgcaatgcataaatattgagttcctgattcaggttggcagatgcgtctgcatcgtaggtgtagctgtagagtgcaccctccattccgttatttcctgccacaaaaagatgcgtctcatcctgcatatacactccgtaaaaaatcgcaccgctgttgctcaatgcagtctgctcgccctgtaccagctcttccacaactgctccacctgttgtatagtggaaaattcctttataatctgcaaaaataatactgttatcattctccgcttttgcaaacgtcaccggaagtccggtatcggaatttcgataaacgaggttatcatctgaacagatctgctcagtcaatgcggtcagctcgtctgtctcttttccggttgccgtgtcatagcagagcaccttgtcacttgtgacgatatagcaattcgttccaaccacatcaaaataaggaatataggtatcctcatcgatttcaaatgtcactgttttgcttccatctgtacagtcaattccatacaaacctccctctgtatcgcgaatgatcagctgtttgttactgtcaaatgctgcaactgatacaaaggcatcttctgcaggcatttcaatcgaaaatgtatgtgtgcttccgtctgcgtccacaattgtaacctggcataatccgttttctgtgtaatcaagaaacgcaactgttccatcctctgcgactgcgacattactgtaagagatatcttcaagcggtgttgtctcccagcttccgcctccatcactgctttttgccacatagatgctataatctgcatcctgccctacaatttcaagtgttccatctgacagtgctttgaactgtaaaatgctattgatctcttctggaaatgctacttttgattcaataaatcttcctttgccgcctcctgcgctgccgttgctgcccgcgctgttgctttctgttccatctgtgcttccgtctgcattttttccgcagccagtgaacattcctgctatcaatgtcatcagaagaactaaaaccattgtgacaactagcatgcttagtttttgcctgttttttatctttgcatttttcattttgttttcatgacctttctttttttattttgttttttaattgcagctccacaatcattgccagaacaagcagctgttcctctgctttggcattctacatgtagtatttttcgtttctggtcttatcttacagaagaaatcttagaaaaatctttaaatttggctttaattgttgtctttaattttattttttgcattgtatgtacgctttgcgtgtgttataatacataaaattatacgcaatgtgtgtattttgtgtatgattgttacttcctccacaggtgcatgctacgctgaaattgcaaatatttttggatcaaaaacaaacgtcatattatatcaggaggttttatggatagcagagaatatttaattgaattgagaacaagtaccggcatgacacgcagagaattctgcgaatatttcgagattccttaccggacacttcaggactgggaacttggaaaccggaaaatgccggattatctgttacggctgatggcttataaagctaaaatggaaaaactcggaggggagaaaacgaaaacaaatgagtaaaattataaaagatactattcatgcaaatgggatagatattggcatttatacctcggattttgaaaacgaatacatttcattaacagatatcgctcgttataaaagcgatgatccaactgctgtaattcaaaattggcttagaggacgagatgttctggaatttttaggtttatgggagcaactacataatcctaattttaaacccctcgaattcgaggggtttaaaatgcaagctggcgctaatgctttcacaatgtcaccaaaaaaatggattgaatccacaaatgcaattggcattgtaagtaagtccggccgctatggcggaacattcgctcattccgacattgcctttgaatttgcctcctggatttctcctgaattcaagctatacattataaaagattataaacgtttaaaatcaaaggaaaacagccggttatccttgaattggaatctaaatcgggagctatccaaattaaattacagagttcacacggatgcaattaaagcaaacctcattccaccagagcttacttctaagcaaattgcatatacatatgcaagtgaagcagacttattaaataccgttttatttggaatgaccgcaaaagagtggcatgataaaaatcctgataaaaatggaaatatcagagattatgcctctatctctcagctattagttttatctaatatggaaagctacaatgcaattcttataaaacaagcaaaacctcagccggaacgaatgcaactgcttcatgaattagccgtccagcaaatgactaccctaagtgctctcgaattaaacaatcttcctggtatcgaacagaaataatctacaatttaaagatttttctaagatttctatgctatactcatccttataaatctcaggagacattattatgcgtattttattgatcgaagatgatctgaatttttgtgaaaccctgcgttttcagttggagcaggaagcttatgaggtggatgtatgccacgacggaagagacggtcttgacctcttcttacaggacgcgcacgacattgttctgctcgaccgcatgctcccgactatgaatggtctgctcgtgctgcaaaaagctagacaggccggaatttccacgcctgtcatactgatcaccgccctcggcgaactttacgaccggattgaagggctggatgccggtgcagacgattacattgtaaaaccattcgccttcgaagaactgaccgcccgcatccgctccctcggcagacgcagcggcaaatgggaagatgacaatttacttaccatctgcgacatcagttatgactgcaacgcgagactgctaagtggacctactagctccatccggctctccggccgtgagggcagattgcttgaagttcttctgcgaagttttgagctcgtcatccgccgtgaagtacttcttagccgtgtctggggcgtggatgcagaagtggaggattgtaaccttgacacttacatccattacctgcgcaagcggctctcctacgttggaagcacgcttgccttaaaaaccatccgcggtgtcggatatacgctggcttcctcctgatccctgattttccatataagatcatgaagcttctgtatagctgccgttacttttcaattattttatccttattgcaatttacagataccttttttcactatctgctttatgtacattatcaggaggtttctcatgtttccacacttcaccttttccggcacaacctatcaggctttgcatcgcaaactcaccttattttgtgcctgcgtcacacagatcattctccttgccttaagtgctctgtgtgtttttgttgcaaaaaaaaatataaagcagggaaacgaaaccgcttttctcacagagacaagttctgtcatttcccatttgcaggagcaggatgtcatctcacaccagtggttaaaccagttacaggaaaacagttctatccagatttatctttatgagaatgggactccactcttttatgaccagtatcatcagacaactgcagacgagcaattatgtgaaaatgcacttctcgccgcagaagagcttaccgggaaccctccttttttcacgaaaaataaaaggctttcctcgcatacggaatatcagttcaactccggcgataacattccctacattgcatccgtcggcagtatcccaaaaggcgacagctacttaaactttctgatcctgcgctcgctcgccgaacagtctcaccagatgctgtcgttaagaattatcgtgatcattgcaaatcttgccgcatttttactgctgtttctctttttccacttcttcatccgaaaaatgttagaaccagtcgaaactgcacagaaaaagcagacacaattcatcgcctccgcctcccacgagctacgcaccccattagcggttgtccgctccggcttggaatccgttgaaaaatgttcaaatgaagaggagcgaaaccactttctccatctgatgtccgaggagaccgtccacatgaaacgtctgatcgacgatatgctgctgctcgcaaattcggatgctgacacgctcaccatcaaactggaagcctgtcagccggatttgctgctcttagacacttatgaaaagttcgaaccactggcaaagaaaaacgggcttcaccttatcctcactctgccggaagaaattctcccggactgcttctgtgatatccaccgcacagaacagattttttccattatcgtggataatgcactctgttacacaccatccggtggaaaagtgacactctcctgccatgctgaaaatgaaatgctttgttttctattcgaagataccggatgtggaatttcagaggaaaagaaatcccatattttcgaacgattttaccgcgccgacgatgcccataccgacagagaacactttggacttggactctgcattgcgaaagaactcaccgaaaagcaaaatgggaacatccaagttgtggatgcccccatttccggcagctgctttatggtgcaattgccatgtgcactttaatatttatgtgatatctacgctctcctgtcaggtgatatttttcctgttattccacatttttcagtgcctgatccatcggaatacgcttgatccttctgaaatccaataccatgacaagcagatatccgatcaggataaacaggaacattttcacatagcccatcgtgcttatgcggaaagcataccatccactgtaggagaaaagcatgatcctccaaactaccttcatgatgacgacacctaaaatcacgctgacaacatcgatcaacacaagaacgatggttgtggacaacagatataagcttgcaatctcccggttctcatagcccaaaatttttgtcatggaaattgcattttcgttcttctcgatgatcagcttcgtgagcagataaatcagtactgcggataacaggatacacagatactggaagtaggtcatataagagcccatggaatgatccagctggtcacacattttcgtaatgtcgtgttctgtgataacggtcgcaatctcatcctcatcaatatccgtgatctctgaatccgagagatagcctgtaaatgcatcactgtccatgtcaaagatttcacaatattgttcattcgacagaaatactgccagtgtctggctgtgatcatagattcctgcaacctcaaactcatactgtttgttctcatatttttcgtcaagaaccactgtttcgcccacgctcaggctgtatttatctgcataggaagcagaaatatatgcctcgtttcctttcagggcagacaggtcactgattttcacataccggctgtcatcctcgattccgtagaccgaaatctcctcatctaacgtatcactcttgtgctgcaaagatgtcatattgaatttctctgcatctttattatccgttgtgataatgtcttcatcctcattctcataagactttaacacatactggtagttcgtaaacatcatatctgaaacattggacttgtaatagtcgagcgtctccggcataccaaccgccattgcaagcataatgccgataaaccagatccccacaaataaaatcaggtaattcgtcacgttctggaacatgatacgcaggcggaaacggcttaaaaagctccattttggcaggcgcatcgcttttttacgttttgtttttttcagatcatggcgtaaaaactgtaatggtgtatgccgcatcatttttataatgacgatgagattgaccacaagcattaaaacaaccggaatgatcgttgtcttgaaaaaagcatccgggttccagactgtctgataagttggaagactgtagctgttataatacatgccgacaaccacatttttaaatacggtatagccgaggatatttccaacgcacgctgcgagaagtgtcacgatcaccggcatggaaatataatgtctgaccagttcacctctcgtataaccggaagctctcagtgttccgatcgtagaagcttccttcacgatcgtgttgctgatggtcactgcaaaaataaatgcaatgatcacaatcaaaatatccagtaaaacaccacccatagctttgtctgaacccatatcatccgttgcaaaattaatagccggatttgcatagcgcggcatatagtcctctaactctttgtcagcacacacaacctgtgtgagcagtgctttcatgaaatcatcggattttgctttctgctccacttcatctgcaggagtatccacataattccatgtgtaagaataatgaacagttttatgtaaactattaaatccttcctgtgtgaccatagccacatcgaatttgatcgcatcaaacatcatatccgttgacttctcatgcagtgtcgcataattgacataggcgatcagtccgacaactttgaacctctgcccactgacagaaatctcatctcccactttgacgccgacattgtctgcatgcatacggtcaattgcgatctcatccgctttttccggaaatgctccgtcaagcaggcaggcaagatccacgttatcattttttgcatagacacggatatttccttccgcctcgccgtcgttgttgtaatcttcctcctcatttcggaagaagttcgcataaacctgtaccggaacttctgtaaaatcaggatcgtttaactcatatttttcttctgcatcagcatatttatcatcgatttcctttacgatttcatcccacgccttgtcgtaggcttccggataagccttttcatccaacttttcatccagctcttttttcgctttgtcaagataatactttttgacgtccgcctttgttcctgtctcaatggcggtgagcagcgtctcatctgcctttttgtccagctcaaaatgtccgtcctctaacttgtattttgtcacaccttcatctgctgcgacgagcatactctcatttgcaacatacataccggaaacaaaaccaattgtaagaatgaggaataatgccaccacaagatattttttccagtcgccaagcaattcacgcggaatacgcttgatgagcggatttttgatctttttctttttcataactgccacactccttaccactcaagatctgctgctgaaatcttgtgctcgttcctctcgttgtggcgcacggccccatcacgaagttttataacatgatctgccatgttcttgattgcctcgttgtgcgttaccatgatgatcgtatttccatattttttgtttacatcttcaatcagttttaaaatttctttggaggtgttataatccaaagctccggttggctcatcgcagagcaggatatccgggtttttcacgatagcacgaccgatggaaacacgctgctgctgaccgccagacaactggttcggcagcttgtatcggtgctcataaagtccaagtgtttgtaacagctcatcgatgtccagcgcattgtcggaaagatacgctccgacttcaatgttttccttcacgttcagattggcgatcagattgtacatctgaaatacatagccgagatgttttctgcggtactgggttagtttcttctcactcatatcttcgagcttatcgccgttgatcgagatgtaaccggaatcggcactatcgattcctccgataatatttaataaagttgattttccggaaccggatggtccaagcagaacgcagaattctccttttgccacggaaaagttcattccgcgcaatacctcctgacgtgtttctccacttccaaaaccttttttcaggtcaacgatctccaaaaattttttctcttcctctgacatagtctccccttttcaaaaaaacgtattttgcaactgccatttttggtgttttagttagtcataactaatctcaagagaattatagcacatgatattggggatacaaggaagagatattgttgttgagaaattttgtcagttaaattaactatttgattacatattgacctttgatactattcgatataatatatgtatatacagttaatactatataacgaagaccgtcgcatgaagtgcgtgtagatatcgattatgaaactaagcttcatgatcaacaatatcttttttaaaggagtgaacatttatgagcgatcaggttgccatcaaaacatggggaaatagtcagggaatacgtattccaaagaatattcttgaaaaacttggactccatgtctcagatactttacaaattgaagtaattgatgattcgattgttttgaaaaaagcatttaaacacaaaacatttgaggaacgcgttgctgaatacaatggggaaatttcaatttgtgattatgattggggagaacctgtcggaaaggaaattttatgatgaatttttcgcagggggatattatcaaaatttctaatttaaaagatgcaatgcttgttgtaagtaaaaatgaatttattaaaaaaacaggtgtttttcacgtctgcccacttttagagaattatgcagaaggtcctcttcacataaaagtacgcggtgtcaaagacacctcaggaactgctatatgtgagcaattgaagctaattgacccttccgccagaagctgcaaacgtatcgaccgcgtcccttatcatatgattatgaatgtttcagacgcaatacagggtatttttgaatatgactaatatgagaaacaaggagacttccatgaccgaaaccctatcgagagcctggtcattatttgacgcaggcaattacactgatgcagaaacgctttataaagaatgttatgcaaagattccttccacagaccatgacaattactggcaggttctcatgggattgatttatgtagaaagctttctggagcattttacagaagcgcgtacttacgcatcgcagttgattgcgtgtgcaattgatcacgaagaaaaacacattgcaatccatcaggcaggcatgatcgaacggatggctggtgcgtatgacaaggctatgaacttgtttttacaggaagaagcactcattgaaaaaaatttcccggatgatgcacttgcccactccgcaaatctctatgagcagggctatgtttccatgaagcttcatgatcttcctctcgcagaaaaaaacatgctttctgccttagattttgctgaaaagtcgaacgatcttatctccatcggctgtgcttaccgcggtcttggcgaaattctgaaatcatcagataaagcagaggatgcggctgtctattttgaaaaagctatcatcgctttccagaaagccggagatacctacggtgtagaagaagtaaaagaactcatgtcaaaataacatcttacataaacatacttatgttcaccacatccgtttctaaatgaaacatgtttttcaaaaaatatgcatgtttagtttgactctctgttcacttgtaccttgttccagtagtgcctctctcttcgcatcctgcaatattcagatgcgtctgtccccactgctgcatcgcttcaatgatcggtgccagcgtcctgccaaaatcagtcatactgtactccgtctttggcggcacaaccggataaactgttctccggatcagcccgtctttctctaattcccgaagctgctgcgtcaacatcttatccgttgccttcggcattcttttatgtaactcactataacgtaacgtctccttcatcaaatgatataaaataattgacttatattttccgccgatcatcgacagtgttcccgcaaccggacatgtaaactctttctctgccatttttctctccctgcaaaatctttacttactttttagatagtatattccaaaaaagtgcatacttgctaaaaagtctaaataaaatataattatagcatggatatccaataacgcaagaaaacgatgaaaggaatagaatgtttatggaattattagatattatgaacgaacgctactctgtcagaaaatacgttgacaaaccagtagaacctgaaaaactggataaaattttaaacgctgcacacgcagcccctactgctgccaatcagcagcctgtaaaactgcttgtcgtactgagtccggaaagtcttgaaaaacttggaaaagcagctaatatttatggcgcacctgtcgctgtcattgtctgtgccgacaaaacaaaagcatggaaacgtccttttgacggaatgcagacaaccgatattgacgcatccattttaacagaccacatgatgttagaagctgtcgaacagggacttggaactgtctggatctgttatttcaaaccggatgtgctaaaagaggaattcaaacttcctgactccttagaaccgatcaatattctcgccatcggttatgcagatgccagtgtggtaaaaccagccaaagaccgtattcctgtaaaagaattagtggaatacctgtaaaattgtcaaaaacaaaaagtaagccgggggcatatcactcaatcctgcctccggcttcttttatgcaatttctttgcattcctctccatctcatagcacatacacgttactctgtcaaagtgcaagtgcaatgccagaattattatatattgtttccaagtgtgcaaaaaatccaacgacttatacatgtttcataattttcaccagccgactcgtaccaagccggtctgcgccaagcccgataaatttttccgcatcttcaaaagaagagattccaccagctgcctttactttcacgtttgtaccaacgtattgtctcatcagttccacatccgaaaaagtagctcctgcggtggaaaatccggtggaggtcttaatgaactctgcgcctgcactcgtcacgatctcacacatcttgatcttctcctcatctgtcagaaggcatgtctcaatgatcacttttaaggtttttccgctgcatgcctcatggatttttcggatttcctgctcgatttcatcataccgtttatctttcaaaaatccgatattgatgaccatatcgatctcgtcggctccgtttgcgaccgcatcccttgtctcgaaaatttttgtcgccgttgtgtggtatccgttcgggaatccgatcactgtacagatcggcagtttcccatcgacatactctgccgcctgtttcacataacaagccgggatacaggcagaagcgcatccatattttattccatcgtctaaaatctgccggatctcctcccatgttgcagtctgtgaaagcagtgtgtgatccactctgcttaaaatatcttttttatccatgtttttcctttctcctgccgactgcccaggcatcgtatcgcttactcatcctgcaaaaatgcgtttcttgattttctgctttattttactttcccactctgccagcacatcagtattttccactcttctgtcacttcaacatttcatgatcactcattatctcaactctgcaagcaaagacgtaccaatcgtgccttccggcatctgcacaccaaaattatctgcgatcgttgccccgatcactgcaaatgtatcctgatcttcaagctttcctgactccttcatggaaggcgaatatgcaacaaacatcacctgttccctggtgtggtctgttcccttataggttggatcatttccgtgatctgccgtaatgataagaagatcatcttcccgaagtaacttaagaagttcgccgagtttcacgtcaaagcgttccagttcctctgcgtatccttttacgtttcttctgtgtccccaaagtgcatcaaaatctaccagattcacaaaacaaagtccggtaaaatcgcgctctgcgatctcgatcgtctgctccattccatgtaccgagcttttggacttattggattccgtgattccttccccgtcaaaaatatcccggatttttccgacagaaatcacatcatatccggcgtcttttaacgcatttaatgcggttcttccatatggctttaaggcataatcatgacggttgctggtgcggacaaactcaccttttttctttccaacataaggtcttgcaatgacacgcccaactttccattcatctttcatggtgatctctctggcgatctcacagcagcggtaaagttcctttagcccaaacgtttcctcgtttccacagatctgaagaaccgaatccgcagaagtgtaaacgatcatatgcccggtcgcgatctcttcctcgcccagctcctctaaaatctccgttccgctggcactcttatttccaatgaccttgtgcccggttcttttttccagttcgtcgatcagttctttcgggaaaccatgctcggtaaacgtcagaaatggttttgtaatgtgaagtcccatcatctcccagtgtccggtcatagtatcttttccgttgctcgcctcggataattttgtaaaatatcccaatggcttttccaccggtgcaatgttcttaagttcttttaaattggcaatgccaagcttctgcatattcgggatattcaggtttcccattgtctctgcaatatgaccgagcgtgtctgttcccgcatccccgaaacgtgctgcatccttcgcgccgccaattccacaggaatcaattacaattgtaaaaactctacgatacttttttgcttccatgatcttcacaccccattttctgttatccatgctgttccaattatggtcaatttctcttcaaatccagatgttttttgtttctggcttatttctcccggtctgacttgatcagtctgcggattgcctccacgccgactgtgattgctgcctctgtatcgtgcacgatcggattatccataccgagtgcgttccgctcttgatttcccatgacgagaaaatctgaaccacaccgcacttttaaatgtgctgcgacgataaataacgccgccgactccatttcagatgccttgcagcctaaccgtttccatgcctcccatttattcagaagttcgtaacttaccggcatgcgctccggctcatgctgaccgtaaaatgcgtctttgcattgaactacgcctgtatgataagtataacccagtccttttgctgcagccacaagtgcatttgccacctcaagatctgcaactgccggatactcgatcggcgcatattcccggctggttccttccattcggactgcgcctgtggcgatcacaatgtcgccgcctttcacatccagatcgattccgccgcaggttcccacgcgcacaaacgtatctgcgccgcactgcacaagttcctccatcgcaatggacgcggatggtccaccgattccggtcgatgtcacactggctttttccccctccagatagcctgtatatgtgacaaactctctgctgtcagccactaactttgcatcctcaaaatgtcttgcgatcttctcacagcgcttcggatctcccggcaggatcacataacgtcccacatctcccggtctgatctgtaaatgatactgtaacccagcttctcctgaatagttctgcataccttccccacacctttctatttatcggtcgttttccattctccaactgatacatctctgaagatattctacatactccggatttttgcacataccttttcccggtgtatcagaaatctttgcaacatccattccgttacattttgttgtcttcatgacaatatttaaagcaggaacatctgtatcgttggaaatataagttccaattccaaatgcaaacttcactctgcctgcaaaataagacgcaatcttatctgcgcgctcaaaatcaaggctgtcactaaataacagtgttttcgttttcggatcgattccaaggctctcgtagtggcggatcattttctctccccactcaaatggatctccgctgtcatgacgcacaccggaaaacagtgtggcataagtcaactggaaatctcttaagaaacaatctgtcgtaatggcatctgtcaaggctgttccatttaaaataccgtattcttttacccacgaatccaaggcataccagttcgaatatgccgggttgtgcttgtgatttccctgtccgacacacatgatccattcatgcgccattgttcctaccggcgtaataccatatttttttgcaagataaacatttgatgttcctacaaatgtagatcccggatagtgaccgtcatttaactttttcactgccagctcctgtgcctcagcagaaagtcgtcttctgagaccaaattcgctgaacagtccaaggttataagttccgtgaagcaacgcgattttttcatctaaacgtctttcaaagcttgccattaattcgtcatagttatatgccatgcggaaataaacttcattcacaatcgcaagcgtcggaatctcatacatggatgtgttgagccatgttccaaatgtctcaatggtcagtccgcacttcgcatcctccgtgatctcaaaatccgcatatctcggctgccacagtctcaagaaatcaacatagcttcccttcatccacttgatcttatgaaggtattcgagttcctcctccgtaaaacgaagtccgcagtatgccttgatctgctccttgatctcctcgaccatttcatgcgtgaaatgcacatctgtgtttctgcatttgaaagaccaggttgtcttataatcagaaaactgatgataaatacactgtcccatggaaaacttatacatatctgtctctaataaacttgtgataattggttctaataacatttttttctcctctatttcgagtaatgattacttctatacatcaatccaattttttcgtgaaacgccaatgcgcttttttactatattataactatgtggcggtttttacaacaattttgtggaaatggaaaagagacctcggggtgaagtctcttttatctatgatcttatttttgttttctgagaacataaaccgcagattcaaaggttctgctgccgtcatgctttgtataactcgaatcatggtcataaaccattccaagcttttgcagcaccttcgcacttcctatattctcttttgcacattctcccataaaattagatgtgccatgctctttttctatgtaatccatgagtgcctgtgttgcttctgttgcacagttttttccccagtcatcataccgaatggaataggacatttcccacgcattatgctccggctcatagacagccccgataatgccgactgcgtgaccgtcttctttctggcgaacgatcataacatagttcgtcctcgaattcggatctttcctgcgcgaaaaattcatgatatcttccggcttttttaccggatttccgagaagataggtatacacccgctcatccatagtccactccgccatttctctgtagtcatacggcatgactctgcgcatcacgaagcgtttcgattcgactgtttcttcctttaagttgatccagtaccgctgctcgatctctccgtcttcctcaatctcggattcaagcacgccgccgttattcatgattgattttgctgaaccgatattttccttattacaagtcatcagtactttattgattccaagcgttttacactcctttagcgccagcgctatcattgcggtcgcatacccttttttccgctcactcggacggattccgtctccgatatgtcctcctgtcaggtaaatgttttcattcaaatagtggcggatgttcactgcaccgacaattcggttcctatctacatccagacagaaaaaagttgaatccggaacatatccgtttttttcttctttgcactccagattttccaagtagtaatcaaaatcttcaatgtcattcttaaagattgcccacggagaacgatctgtgtggtttacttcctgatcgtgtttccactctttgatcatctctgttaattcgtcttggtattcgtaggatgcttttatcagttttaggttcatatcggggtgtcctccttaaaaagcagcaggtctatcataacctgctgcccttaaaatacataatttatctatttatttctgtaattgctccatgatcagctttctctcatcactttggattcccagtgcattgagtgcctgatctactgaccatttcatattttgcattagattttttactgaaacaatcttttcctttaccacatattcttttgcgtattcctttgcatgttctttgcatatttctttgcaaagttttctacaatcttctctaaaactatttttcacaaagacaactactaatcaatttttccagcatatcgttgctggcatttgccgatctgacactggtggctatcatctcttcttttgaaacatcggtaaaatcaatttcaaatctaccattgttcaagcataactgctcaatgtatattctctgagtccttccattaccttctctaaacggatggatcatattaatctcacccaggtaataggctagtctctcgctcatttcttccttatcggttatgtcagctaagaaattttcctttttcagcttacgatacaaatcatcaaactggctttcgataaactgcaccaaacaggaaacggttcctttggaaatatcaaccgttctcgtcttgcccgcccaagaatatacatcactgaataaatgcttatgtatagaacaaagatgcttaaaagagaaatctccagtaacgccttgacctacaagttctgcctgacgtactgctgaatagtctctttcagcctcatgcaatgtatctaaatctcttatatccaatttattctttaatacatttgttcccggataacagtacttagcatcctgtgcatcctcatagaaataatcatactcttgatccttcaacctgcttcttggatactctgtatttcttatttaattctgtaattgcatctgctgcagaaactttcttggttaaaacatttcttactctttgacgacattctgcatcaaatggcatgctttccattttaaaactggattcaatactgcttactcttctatcaactgtcatacgcgtatcctttctcctttctctttcgcagaaaggtatttgttcttctatagtataccacaaaacgctacatctatactacaaatttccgtattatgaagagcgaacatattcatacatctacgacctggaaaatgtagaacttaataattgtttttcatcttgttttgtctttatttctggttgtgccaaatacacatttttctctattttatatttcatcacattacatcatatgttattgaaaagtgtgtcaaaaggtgtgtcacgttcatagtataacatatatttatgatccaggaaataaaaagagaggtcgcacaagcacctcatgtacctgcagcctctctctatcacaatacagccattattttattaagctctttcctctttgtatcttccatcacatcacaataaagatccattgtcattgcaaacgtgctgtgtccgagaattgcttgtaaaactttcgggtccatgccattctctatgcacctggtagcaaaacagtgacgtaatgtgtgaaaagtgcaagtatctatcttaattcctgcttccttcatatccgcaactatttttctctgatccgttctcacgttcatatcaaaatgtggtgttccatgatttgacgtaaatacaatattctccattccttccagtggttgccaatacttaccggttttaaatttctgcagacgttgtttacttctccattctttcagaagtacatacaattcactgcctttttccattggtatgattcggcggctggcctttgattttggtgtatctaagtattgtcccttaccaggaacatagcaaagtgtatgtgtaatatggatttctccatgctcaaaatccacgtcttgccattgcaaccccaagacttcccctattctcataccagtaaggctcgccatacgatacaatggataataataactctctttggcagcttccaggaattgcttttctatatctgcagataatgcttttccctttttactatctttgaatttcggcggtgtggtattttccatagggttctttgatataatcccatttcttgctgcctgcctcaaagaatcatacaataaaaaatttatggttgatgcaactgtttttgatcgttctgtagctgctttgttaataaatttttgtatcatatccgctctcaaattttttacctgctttttcccgaatatcttttttatataccgattgtagacattcttgtaaagatttatagtcgattccttgcaatctgcttttttgtatacatcgagccattccacaaaccatgcatcaaacaaaatagccttttctttgctgtataatccgtgctcaacctcgtatcttttatctctcaatgctttttttgcatctggaagttttcggctatatccggaatatgtcacacccgaatacttgaaacgccacatataccgcccgtctttccgcaatgttatgccagtaggcagccctttatctttttgcttcgccatataatcacatcctccaaacagatggggcagtgtgcctcacccagataattatttgcattcttgcataatctccattgccagcttgaaacctaaaataaacccggctttctctgaggatctggcaaaagcaacactattgtcaaaaatctgctgttgctttctataatcttcctggatttctcccggaaatactttatcaagggttacagacagtttatcaaattcccttttctgttcttcactatatgggatttcctcattttggcttgctttataattctcataaatttgttcgattgctttcatgttcgtactcctttgcttttatttataacgtttcgtttctgattacatattacatcatttttgttatgttgtcaaatatttttacacttttttgattacattctatattttttcaattgcaaatgtttctaatcaagattataatataaacatcaatccatagaaggaggtgcaaccagtggtaagtgacaaaattaaggctctattgaatataaaaggtaaaaaatacaaagaacttgctcagttatttggaataagcgagcaggctatgcgaaataaatttgctagaggcagtttctcagcagatgaactaattagaattgctgactttgtgaattgccaacttgcttttaatattgatgccgatcaaaaagtcattttaacaatagaagatttgagaaatcctgttactaataccgaaaaataatctaaacataggaggctcgctatggatatatcaaaacgttacagtgtagagttaaacaaaatcaataatcatctgacggatcttgaacgaggacgtatatatgaacttacccaaacaccaggaactccgtcctgtgctactatggctcaacatcttcgagaagatatttccactcttcttgatttaattgaaaacgacaaacctggagtattagaaaaagtgtccaacgtaacaaataaaatataagttgctttagtggtatacactcggatgattcgttttgtccgagtgtttttcttaccatttggtaattctatatgcataatatcaattgcgccacttcttaccatctatattatctattataacgtcgatatgaccgcagggagcgtttatctcgcattatatggggaaattattgtttttaccttttacacgctgttatcgcttatataattcaaaaacaaaatatctgccagctcatggatacaaatatcgatatatcttttaaatgttccatcacttacccctagtttcttttctatctgaacatgagacataggctttttcacgatatattccaatacaattgcattatgcctaatactatatgtatcatcctgctgcatcacatgatttaattccgcgtgacgtctaacaagccaatccacatattttcttattgtgctttctgctgattcaaacctataccggtttaacgcttcccttattacttccacagcaaatccatgttcctggtcctgtgaatcttctttcccttccttaaccattaaaattataaaatcatgtatttgttccactgctgcacacctggtgcattcttttacctgttcaaattcttctgctgtcatagcaacaaattcctttcatcctctgataattcattgaaatcttgcacaatcttctttcttgcgcgtttagctgcaggcactgataaaaacgacaagagagcatttctgtatttcccggttcttatttgtttaaatgcttcggttttaattcgtgagatattttgtcttgtacaacccatatattccgcaatcgttttttcactatacccctggtaaaatagagccttcaaaactaattgttcacgcccggacaactctacaagtgctttctgcagttctatgtgcaactcttccgcatatggatttgcaagcgcatcatccgatacgcattccgagcttgcaatcatatccattacagttcctgaatccttatcgctttcgttcaaatagctgtcaagactctgcatttccatttttcggatagtctcaactactgagcgtatagcattatcagaccacgataatattttctgaatgttttcaatcgttgccgattgccctttgcttctcagattttcttttgcctgcgtatattcttttatgcgttttcgcatatatgcagggagacgcaacgcctggccatttttatcataatatttatatatcgattttctgatatagctttcggcataggtgaaaaactttacaccggcagcaggatcatatcttctcacagcttccattattcctataaatgcctgttgttccagatcctcaaaatcttgtcgatgtacattccgctgtaagccggtggcctgatgtataattttctgaacaagtcccatgtttgaaacccataactctgttaatagctcttgtcgatctccgacactgctttgtatctggcttacaatttgttcatttcttccgactgaatccacctatatttcctccgtccaatattgatacagtgtatgatttcttacatgatttcttctaaggtttctacaaggattctttactagatattagataatagagattagagatagaataatatatatgctcatatccacccctgcagccatatactaaattatgctcattgcccgattaaaggctgtagatataaatatgcgagcttctatctccgaaacatccgttgcatctttctcataaaatccgtttgcatctgctgccacagtgcaggtgtacaaactgccatctgctcgccggcataaatatctaacttcatccgagagaacatccgcaaaaataatataattctgtttgttattctccatcgcctgcacctctttcattgtccggaatataaatattaacttcggttccttcgtcactaaaaccagtaccaccattccaatattctggttttcggtttttcaaccagaatatttgtgctgtggtatctcctggaatatgtttctttgttacaatcctttttacaacttttccgtctttggtttcttctcgtatttcctcataatcatagccttttgctctcttaaaaagagcattctcaatttctctatcggctgcatccttccccttttttaaggcatgacatatctgccaatattcatttttccaccgataaagtgttcttacacttattcccatgttttcggctatttgcccatcagataaaccatccctggcccagccttgaaggagcaacaatttatcatcatccagccactcgcttgcttttccctttgccatcgttgcccctccttcctgttggtgcacgtatcgcattcataaaacattgtttccgatcaattactatagcattgcaccacgacgaaaaaacacggtcgacatgagacgcgcttcctcatccatgctcatgactttgctaagatccggaagattacaggttattttctgacctttgattctgacatctgtatcaccatttgcttctcctatattctggatacttttacgaacaagccataaatttttattaagttcatccaactgctgcaggttctcatgataaatctgcgcagccaaaagaatcgcctgcaatctgttgcgccattcatagccatataccccgcataccttttcccacactgccagtgaatcacctgcagatagtgccggtttttcctcttccgcgcttagcagttctttgagacattggacaactttctttgcatcttcaagttgatctgtcagtatgataatattttccacatctccattttcctttgatgcctgcaatttcttttcaatttccattttcttctgctccgcatcatcatacttttcttttgcatgtatcacacatttttcttttgctgcaatagcattatttagtggctctataaaataccatatatccggaaatttttcttcacgttctttatccaaatttgctgcatctgttaatatgtccacgagttctattgacaatcctaatctatgaatagatacaagcatcgggttgtcgtgattgttgaaatctataccggcttccactgcctcctcatataatttgttttctaaagtctttgcttttgttatttcgtcaagctgtgtttctcctgcttctgattctctcgcttgaatctcgatagcctcctggacgttttgcaactgccgctttaattgccgtatctctctatcaaaagagggaatggcagcaggctctgtaaaatttctctttttctctttttcctcaataatttgtttaatccttgctgcttcattgtttaatgaaattttagtatcactcattgtttttatcctttcttgtgtcagtaacaacacacggtcatttggcaaaatgaccatattatttcgtagaaataatattcatgtgtttatcttggtactgttttatattggtcttgtttgataatggttttgttatattcctcatatttcggattccctaattctcgacttccttattttggggattccgagaaaaatcacataatttgtagatgtttctgccatataggtttccgtttttcagcttaattttttctacgattccacgactaacaagcaaatccatatgtttataaaatctcgttttgctcattccggaaacttttattagtgtttcaatacttggatagcagcttcgctttttatctgcatagcaagccaaacacgcatatattagccgtgactccggcgtaagtgtcggatcttctataatggctctatccactttcccatagcctcctttcattatgtgtttgcctccttttgcttgctaacctggtttttagggaataaatgtctgctgcccctcaacttctcccaatgcccggcgtgcgctctgtattgcaataaatgaatgttttgctcttttttccataaaattacaaaactctctgatttcatctttattcgccgggagataataaccggcagaagatgaacatattacaatgccctttactctatcttctgtaacaatgtccctcaatacccgatcactcacgccaatttttgcagctaactcacgtgcggagattgcattgctcttcccagtaggaagtatgtttcttaaatcatccatgccgttctcctattcactgattgcatccagatatttctggatttttccaacattccacaaaaccctacgtcctacctgcactctggcctgcgcagcggtgccaatttcaaccgccgtttttcttccagatgaaagcatagcctgcaggccgttagtatcgaccatttttctatcttctaatgttccgatctgttttgtcgcgttcatcattctacccctttcttgtctttatctgttttcgtgttgctttacatagcgtaacatgatattatatgtaatataagacgtacttttcgagtataaaggagtggtattattgaaaagagagcgtgttaaattacgtagtttcggagaaaaattaaaaaggatcagaactaaatgtggattaacacaagataaatttgctgatgaaatgaatatctccctcgatactgttaagaactgggagcaaggatataattatccatctatagacatgcttgtatcgatttcagaatatttcaaatgtgatttagattatttgatagggcagcagtcaatgcctaataaggagttttctcacattgctgatatgataggaatttcagagcgagctgctgctttgcttgttaatgcgaaagaacaaagcaatcctattacagaagtactttcagaacttatagaaaactattcactgctcgaaaatatatactcatgctcgacagcaaattatggtagtgtcggcacattcattgatgtatctgatccatttcagccaaaagggaagcgctcaatgtttgtcactcctcaaaaagtgcgccaagctgattctatggatttatttaataacctgcaggaatttgttgataatttacgcaagaaatatggttttccgacgtctaaagagagataatttcagatgtctgtttttacttcgtctaatttcatctgaaaacatgacatgttataaattatgaaccgttttacacttttccttgcgtcagctcataagatatgttatattatgcgtagaaagagggaaagccagagaagcggcttacccgaatgaattaaataactgttttatcaacagccgtcattattcgcagtaatggcggctattttcgttttcccttgaaaatcgtgtagcacaatccaacaagggcgcaaatgaatattccaatctgaattaagtcagagtatgtaacatacattggcaacgccctcctttctttcgtctggagggttagcccctccgaaaaagagggtaagccgcccggctctctggtttcccatgtgcgaagtatatcataacttatcaaatcagacaacgatatatcgacaaaatccccttagattactctaagaggatttgcttatttcgaaacgtttttctataaaagtgtgtcaaaaggtgtgtcagtcttttatttcatatcagagaattgttccggaaccccctataaaataagcattcttcggattatttctcatccacgacctggaaaatgaagaacttaagataatacgactcatccgcagcccacaaaatcgggtgatccggtgcctgtgtacggaattccacctgacggagtctcttatgcgttgcctttgcagcctctttcacagtctttgcgagaagatcctgcgtcataaaatgagagcaggaacaggtggcaagatacccgccatctttcactaactttaagcccttcatgttaatctcacgataacctttgattgcattttttgtcgcctcgcgggattttgtgaacgccggcggatccaggatgactacatcatatttttctcctgcctgtgcaagttttggaagttcatccaaaacatttgcctgacggaaatgtacggtgttttccagatggttcaatcttgcattcgcctctgcctggctcactgcatattcggaaatgtcaagtccggtgacatctgcagcccccgcaattcctgcgtttaaggcaaacgtacccatatgtgtgaagcagtcgagcacttttttccccttgcagatgcgctgcatggcaagacgattgtatttctgatcgaggaaaaatccggttttctgtccgtttacgacatccaccatatagtgtacgccattttccacgatctcaacattggtgtcaaactcctcaccgataaatccttttacctttgcaagtccctcttttgtacgctcgttagcgtcgcttcgctcatacactccgcggattttgataccgtcttctgccagaatctcttttaaaaagttcacgatcttttccttgaactgttccattccaagtgccagacactcaactacgagcacgtcctcatacttatcaatgaccagccccggtaagaaatccgcctcgccaaaaataatacggcaggaggaagtatctactgttgttttgcggtactcccacgcatttttcacgcgcattgtaaggaacgcatcgtcaatctcctgctccggttttcgtgtcatcatacgcactctaatcttggaattctggttgataaaaccttttcccattgggtatccgtcaaaatcgtgcaccgtcacgacctcgccgtttttgaatcttcccgtgattgtatctatctcattatcaaaaatccacgcaccgcctgccttaatggtacgtccttcgccttttttcaatgtcacgattgcactcatgctctattctcctctacatttgtaattgtctatgtaatttcttatttatatttctgctctatcggcatattttaacatggttcttctttgttcacaagattggaacgcttttatttcttgcaaaatattttcaaacgaatcataatgatattatgatgcaaggcagcagttgcacagcagcggagccttcaaatatcgtgtagaaaataaaagtgaggcacttatgataaagatcagtttatgcatgattgtgaaaaatgaagcagaggttctggcaagatgtctggattctgtctgtgacctaatggatgagattattattgtagacaccggttccaccgacgatacgaaggcggtcgccgcaagatatacggatcaggtttataattttacatggacccatgatttttctgctgcgagaaatttttctttttcgctggcaaatatggactatatttatgcgccggatgcggacgaggtattagacgaggaaaaccggcaaaaatttttccagttaaaggaggctctcctgccggaaatcgagattgtacagatgaaataccgcaccgtctctgattttaacaccgttttaaatgcaaaaaccgaataccgtccaaaattgttcaaacggctccgctcatttgaatggatcgatcccattcacgagacgatccgcctgacacccattgtctatgacagcgatattgagattctgcacatgccgcaatccatgcaccataaacgcgatttttccatttttctggacgcatttgcaaaagaaggtatgttttcttcaaagctgcgcagcatgtatgcaaaagaattatttaagacaggcgatgaaaaagatttttcagaagcgcttccgattttccggcagatttacgatacaagtacggacacagatgcacagaaagaagcagcctgtgtgctcgcgcgtgcctaccggattgccggagatacgaaccactttttccaaatgacactgcgtgatatgctctcaacaccatgcgcagagatctgtctggaacttggaatgtattttgaaaccgcaaaagattacgaggaagccgccctctggtattataatgccgcccacgagacttccagcattttagatgtgcacacaagcggcgatctgccacttgagggattgatccgctgttacgagaccatgattgccgctctgccggaagatgatccgtttaccgtgctcactgcaaaccggtatgagaatgctatttacgacgccaaagaggctcttgcgaattgggagctgccggaggaattataatatttaccgctctaacaggtacgatccgaacagagcggtaacatattaccttctcactccagcctgccacagcgtccatttgtcgcaagcagggaacatggctgatctaacgtgattgtgccgccctccacggttgtgacaacgccgccagcttcctctacgatcaatgcgcccgcagcatagtcccacggacttaaacgcagttcaaagtaaagttctgccctgcccgccgctatgctgcataggtcgatcgctgccgaaccgcttcttcggatatccatcgctttcttaaaatatgcatatgccatttgaaaggattttttgctcaattcttcatagtacggtgctgtgccaaataagacaacgccctccgaaagcggatttctggaaacatggattggttttccatttaaaaaagccccttttccgcgctccgctgtaaacatttcatcgaggtatggattgtatacaacaccaatgtatttttctccgtcttttgtcagtccgacagagattgcgctcacatgatagtctttgataaaattcgttgtcccgtcaatcgggtccacaataaatgcaaacccttttttaatcgacgcatgaatgtcatcttcttcccccacaaacactgcctccggaagtatctcaaaaagtttttcccgaatggtctcctgcacttttttatcgtaggttgtgacaaaattagcgtgcccttcttttgcatccaccatgtctgctgtccgcactgcatctaacatgatttttccacagtcgcgcactgcatctgctattttttccacaagtgtgcggtttaatttggataacacctgcgtctcacgctccagccacgggatttccggtgcaaatgtgatactctctttcacatcctgctgcatctgcgcaatataggatttctgtaaaaagtcgtgcatttttttctgctctctttttaataaggaaagattgctctgatatgcctcctccactgtcacaaatgtgccgcgaaatccaagtttttcctcataatcgtctaacactcccggtgcttttttgtcactcataagccagcactcgtaatagcatgacttcatctgaaaatagctttccggatcctcggtatcaatgttctgctcaaatgtttccccgattttcaccccgatatggatatccgtgtatcctgtctcctctgtgatttcccgaagcagcgtctctttttctgtctcgcccttctccatgccgccacccggaaacttataatcgccgcggtttgtctgcaccataaggattttattctgataatggatcacgccgcggactgcggttctttgattgatatgtaccggtgtctgtggcagctcgtccgtgataaactgtaattgaaactgcatattgctgtcccctttctgtaaacgcatatgttttgtctctataaaaaagcttaaatgtatttgcataaaaaatcaagatgcctcgtcttaagcccttgtaaaacatctcataaagtgttaaaatgttaattgataattttttaacaaacattgcctgtgttttttatttgactgaaaacgaaacacagcatacatttcattccaaatttaggggaggtatttacaatggattactcacaggaatacaaacagaaacttgtttccgccgatgaagctgtaaaattaatcaaatccggtgactgggttgattatggatggtgcaatggtacggttgacgttttggatcaggcactggcaaaacgtaccgatgaacttaaaaatgtaaatttacgcggtggtattttattgaaaccgcttgctgtttttgcccgcgaggacgccggtgaacatttcacatggaactcctggcatatgtccggtatcgagcgaaaactgattgcccgcggatgtgcttactattctccgatccgctactctgaactgcctcgttattaccgtgaatcctcatgtccggacgatgttgcaatgatcatggttgcgccgatggataaacacggttacttcaacttcgggccaaacgcatcccatctcggtgcaatgtgtgagactgccaaacatgtcatcgtggaagtcaacgaaaatatgccacgctgcctcggcggtacagaatgcggcatccatatttccgatgtcacatatattgtggaaggaaacaatgctccgatcggcgaacttggtgcaggcggtcctgccactgatgttgataaaaaagttgcccggcttatcgtagaccagattccaaacggtgcctgcttacagctcggtatcggcggcatgccaaatgcagtcggttccctgatcgcagaatctgacttaaaagatcttggtgtccacactgaaatgtatgtagacgcttttgttgatattgcaagagccggaaaaatcaacggttccaagaaaaacatcgaccgtttccgccaggtttatggttttggtgccggaacaaagaagatgtatgattaccttgatgaaaacccagagcttatgagtgctccggtaagctacaccaacgatatccgttccatcgcagctctggataattttatttccattaacaactgcgtggatatcgatcttttcggacagatcagttctgaatcctccggtattaagcagatcagtggtgccggcggacagcttgattttgttttaggtgcttatctgtcaaatggtggtaagagctttatctgctgctcctctacctttaccgacaaacagggtgttatgcactcccgtatccgcccgactttagcagaaggttctatcgttactgatacacgtgccaacacacattatgttgtaaccgagtatggtatggtaaatctgaaaggactttcctcctggcagaaagctgaggcattgatctctgttgctcatcctgatttccgtgatgaactgattgctgaagctgagaaaatgcatatctggagacgctccaataaataggtaaactggttattaaagagaaaaaccgtacaaccgaaatatgatgttcctgctcgcaaagctcacaaaggaaatcatatttcggttgtacggttttcttttatctacactgtgttcgacttataaatgaacgcttgtctctgtcctgctttacattatgaatgaagccacaaaatctgcctgtaatatcttaaacgatttccgtttacaacgtccccgccatgcgttcgcggattgctacccctgtcggtgttccggcaagtcctccttttccggtttctcggatatcctcgctcatgctgcgtccaattgcacgcattgcatcaatcacttcatccggaggaattttacttgtgattccagccatgaccatatccgcagaagtcagcgcattgactgctcccatgacgttacgctttacacatggaacctctacaagtccagccacaggatcacaggcaagtcctaacagatttttcagtgccagtgcggctgcatgagaaacctgcactgcgtctcctcccataagatatgcaacgcccccggctgccattgcggacgccgagccaatctcagcctgacaacctccggctgccccggcgagaaacgccctgtttgcgatcacgcctccgattcccgctgccacgtaaagcgcttccaccattttttcttccgtaaaatgtttttcttcctcaagtgtaaggaaaactgccggaaccactccacacgagccagcggttggtgccgctacgattcgcttcatacaggcattggattctccggtctttagggctttttccattacttttccaatgaatctgccacagagcaaagttcctgcttctcttgcagcgtgcattttctctccgtctgttccgactaatccgctctcagattttaatgttccgtcgtaattctcatccgcctcacgcattgcctgatacatgccacgcatctgcgcaaatgcctctttttcactgattccctgttctctgcagtcatcctcctgcacgactttccagaacagttttccttcttttttcgccacttcacatatttcttccaaggatttatacatgattcttctcctgatttttacaaattttgtcacatttacacaacattcataacataaatctgagtttcgcaaatacaagaaatttatttacagcaaactcagataggttacttttaaaattccttccatccgttctaaccacttgagtgcatccgccggaatttcctgatcgcactcaatgaccataactgcatttccaccacggcttgcacggtataactgcatcgttgcgatgttgaccgatttgtgggcaagcatggatgtcacctctgtaacatgccctggctggtcaatattatgcacgatcactgtcggataatcaccactgaaatttgctgtcagaccatcgatctcacagatttcaatacgtccgcctccgatagatgccgcgattacctccagcgttcttcctgattcgcctgtaagttccagtttgacagagtttggatgcacatccccaagatcgatcccggacagtgtgaactgcaatccctcacgctctgcgatctcaaaactgtgcggaatagccgggtcatccacctgcattcccagaagccctgccacaaccgccttatccgttccatgcccttttcctgttgccagaaatgatccgtgaaaatagatatctgcctttaccactttttcagcaagcagtttgtgacagactcgtccgatttttactgctcccgctgtatgggagctggacggtccaaccatgaccggtccaataatatctaataaattcataatcctccttgttttgcgaagcaaaaaacagggtataccaaatctgatataccccatcgtatagtttttgttgataaaacatttttattctgatgtagaaattatatctgctttatataggaaatgcaagcgttactgctcacccagcagtaaaacacttgctattttgctgcgtaaggaagtgatttaggaatgaacagtaacagcaataactaacgtttttctattgattctgtcaaagataaatgtcataatataatctatactgtaataggataaaagtacggaatcattaccttataatatagaagtggtaaaggtagactctgttctgacaaacacgccgcttccggggagaagatgaaatgcagataaaatgtgaatactgtggttccatgattgaagaaaccgcagataaatgtccattttgcggggcaacaaacaatgcagtcaaacgaaccgccgataaaacaccaaaaacaatcgccgaattacagcagtggtatcaggacagacacctgccgccgtatgagacaacaagattttttattggcatcaattataagaaaccaaaagcatttggtatttatcaggatggcgaccagttcattgtatacaaaaacaaggcaaacggcgaacgtgccatccgctatcagggtacggatgaagcttatgctgtcaatgaactttatctgaaattaaaatctgagattttaaaccagaaggcaaataaccagacaagaaaacaacagcagacactcacgcgggagcagaagaaagaaaagcgaaaaaacatactcatcacttttgcaatcttttttgccggctttgtagggctgatctccattgccattatcgatatgcttgccaaaggattcggagcttccctgttctggtccatttttcttgcaatcggactgacaatcgcaagtttaattctggcaggtaaatttggtggccgtgttcctctcctgcaaaaatttcatgataacgtaattggggaaaagtcgtccggtcgcgcatttttactgacctatgctgtcatttatgttgtttctttttgcttattatttgtacctctccatgcatattatggtgtcagttattatcggtataacgatacgatttacgccaacacacgctatagctggtatgaatacgaagactacgtttacagcggtgactatgaaaaagtaagcaaatcctcgattccggacgatgttttagccaacaaggcagactatcagtttgattataatgatgaaaaccagtggacttcctcttttacggaatttgaagacagcaattattacgacgagcattatacttccgattctgattccgacagcagttatgactgggattccggcgacagctgggactctggaacgacggactgggacagcgactggtaagcttttaaatacaaaggagtacatatggaacatacacatatcgccgaagatggtactgtttatacacatacgcatgaggaagcgcacgaacacggtcactctcattcgcaccctcatcaccatgaaaacacaaaggcagttttaaaccgaatgaaccgtgcgatcgggcatatggaggctgtgaaaacgatgattgaggacgggcgcgactgcagcgaggttttgatccagattgcagccgtccggtctgcaattaacaatatcggtaaaattattttagaggatcatatcaatcactgcctgatcgatgccattgaaacaggcgacgatcaggttttaaaggatttaaacgaggctattaacaagtttgtgaaatagcctccggtgctatatattctcatttagtcatagtttgttcattttttattcatattttatagaaaatcttgaaatcttccttcttttttatttatctttccaattgtttttttctctcagaagcgatatattcttttagtatcaaaaataattttttattgtaattttacatgtgttttacttggacaataaaagagctttttaaaactctttttcattgcagattaccataactgctgatagatgtaacgcacctgtattttttttgcaaaagcaattgcaaaaagctcagatgcagacaggaaaaagcaatttttgtattttccagagccaacaaggagggtatatgaaacagaaatttaaaccagtcaaagaaaaaatgaataaattattccagaaatttgcaccggtaaaggaaaaagtacagcttctcctttccaaattaccaaagaaaaaaccgcacagcgaaaagtattataagagaatcgcatttttcaataaatattctcttattttccactttattttagcatgctttattacttttaccgtagaagtgatctccagaagagactttttctctgctgtttccttcgtaggcaatcatacatgggcttacctttacaatgcctttattgtatttgcttccttatcaattgtttacctgtttaagacaagagcacagcttcgtgttctgatcaccgggctttggattttccttggaacagtcaacggaatcattctttctaaccgtgtaacaccattcagctacactgattttaaaatgcttccagacttgtttgctatgcagaacacaaattattttaccgcggaagaggcaacgatcgttgttgctgttgttgcttcctttatcgcctttttggttctcttctttattaaaggaccaaaatatcagggaaaacgtcacgttgtactttccccgcttgcaattgttgcattgttagttgtcggtatcccgatcacaacacaggctgcacagaactccaatattattgcttcttattttgcaaatattgcacagggttactctgattatggatttgtttatggtttctctacaagcgttgtcggtcgtggaatgaataaaccggatgattactccaaagaaaccattgacgctatcgaaactttagtagactcctctaaggaagaaacaacggtttccgctgatagcgagccaaatattatttgtattttactggaatcctttatcgatccatatgatgtaaatttccttcagatgtcagaagatccgattccaacattccacagtttagagcagaacttcaccaccggttatcttaccgtacctgttgtcggagctggaactgccaatacagaatttgaagttttaaccggtatgagcatgcagtactttggtaccggcgagtatccttacaaaacaattttaaaacagtctgactgcccaagcgttgaaagtattgcatctgacctttcctctattggttacggcacacatgtagtacataacaacactgctactttctacagcagaaacaatgcgttttcaaaaatgggatttgatacatttacaagtaaagagttaatgaacattaccgagtacacaccaagcggaagctggccaactgataaagttcttgtaaatgagactgtaaaagctatggatgcaaccgaaaatcagtccgactttgtatacacgatcacggttggttctcacggcgattaccctgctgaaaagattattgagaacccggagatcactgtaaccggagctgccgatgaagcctccaataatcagtgggaatattatgtaaacatgatccgcaacacagataactttattgcaaacctcattgacgcagtcaaccgccgcggtgaggataccattattgttatgtttggcgaccatcttcctacgatgggtcttgaagattccgatatgaaatccggtgatattttcaagacaaaatatgcaacctggaataacttcggtcttccaaaacaggacgcagacctcacagcttatcagttgttagcacatgttaccgatcaggtgggtatccatgaaggaaccatgtttacttacacccagacacaggcagattcctccacttaccagaatggtcttgataaccttcagtatgacctgctttatggtgagagatacgcttacaatggcgaagacttatatccggcaacggatcttgtcatggacgtggaagacgtcaatgtaacatccgtccgcaagaatgtattgaataataccttagcggtttacggttccaactttacaaagaatgccaagatttttataaatggagagaaggttcctaccacttaccttacctctggaatcctgacaacttctctggataatgtttccgatggcgatgtgatttccgtaagtatcacaggttcccagggaattatcttacgtgcaagcactgatgaagttgtttatgaagatcctgatgtgatcacaactgaaaccgaagaacctactgaggtaaatgagacagagtcttccgaaacggaaaactctgaaaccgcaaattctgagactacaaacactcaggaaaataattaatcatagaaagaatcccggatgtatgaaaatctacatccgggattttcttattgcaaatgaatcactttacgcacaatcgctctctgctccagatcttccctgaaatctgtgtccgttttcttcttactcatcctgctttcatccatgacataaatatatatatctgacataatatcttttgttggaactttaaatacaccttttgtctcatcatagaatccctgcatggtgagttcttctgtactgtcttcgtccccatatacaagcacatcataattaaaattgtctctgtatatatccgggtgagttgttttaatcgtcgtaataattggtgttacaatcacttcatctatagaatagccttcgttccattcatttacttcgtacatggtagcatcttctttgttgacctgtatcgggattgaaaatttccactctccccatatggaaacactttggttttttacattttctgcaataagtgttacattataaatatagatttccaattggaactgatctgggaattcttttcccgaaagatcaaaatactgtgatccgacaaatgtattttcatctacgaattttccatctactccggctgttccccactcctttaatgaatatagcttgtcatttgatttgattttttcaattccttcatatcctatctgattctttgcaatttcataatcactatactctgtaaattttttttcactctctatcctataggaaacaaatagattttctccgtcacaataagcttctgtcattgatatcgtaattccatgatttctgaccttctcgtctatactggtggcatactgctcatattctccctgaaaatcaagtacatcctgaatataggaaaatacactcccaataatcggtatattttctgccattgtcggatttgaaacagtgacaactccaattagaattaccagacaggatattgctgaccatgcgcatttttttcgaaatcgaattttctgtgcagtcttttcggcacacactattgattgatgtgttttctcattcaaatcttccggtacggatatctggctcatttcatcatgaatcttcaaaatagtcctcctttaacattttctttaaagcagctcttgcccttgataaattggttttcactgtattctccggtatcatctgcttttttgcaatttcctccacagacatttccagaaaatatttttgaatgatgacatctttatattttggggacagtcggtttactgcgttcattaaatcaagtttttcctcaacatgttcagaatgtgaagcctcataaaatgcttcctcgtattccacaatttttttgttctgttttatataacgaaccgctttattcataatgattctggtcatccatgttgaaaacagctccggatttctcagtgtctttattttcagatatccctgatatacactgtcctgaacaatttctacggctgcgtcctcattccttacatataaaaatgcaattttataaaagtatgggttatactgatgaatcaactcaccatatgcatgactatctccatgaattgcattataaaccaaagagtactcttcttttttcatctttcacccacctttcatatattagatacacaacccggggatgaggtttcaaaaacttttttgtataatgtaaaaacaccagatccatttaaacaaaaatagatctggtgtttttcatgttatctatagcttttttctcggcatttcagaagaaaatccggggattatcactttacagcttttatatgtaagaatgatcgattttcgtcaccacgtaatagttatcaccgaaatgctcatgcacagactcgagcacttctgtgagcagttcctcatccgtcaagcggaatccaaatggtgcaagaatgtcaaaaatgaggttcgtatgcgtcccgccactgaccatacggaaatcgtgaatggacaaatcttcatcaattgccttgatcagagataccatagctgctttcgtctcactcacatgctcgtccgaagtcacgattggatccatgtggatcgttgcctcacatccaagcgtctcccgcagttcgttctcgatattatcgatcacatcatgcagttccatgatattgccctccgccgggacttctgcatgcagtgagatcatctgccgtcccggaccgtaatcgtggacgatcaggtcatgcattccgcacacttccgggtgtgacattacgatctcatctattttttccacaaattcatgtgctggtggctgaccaagcaatgggtttaatgtctctctggctgcgtcaaagcccgcatagccgactaacaagccaacaagcagaccacagtaggcgtcgattttaattcctgtaaaataggtgaatacggatgccagaagcacgactgttgttgccacagtatcactcaggctgtctgtagccactgcgcgcattgctgcggaatctatttttttcccgatagagcggttgtaatatgccatataaagcttcacaagaatagatgcgatcaggatcaccgctgcaagcagcgtaaactctgtttcttccggatgaatgatttttccaatggaatcacgtacaagctcgtaacccattaaaaggattgccgccgcaacaactaaccccgatacatactcgatccttccatgaccaaacgggtgctcggtgtccggttttgctcctgcgagtttgaagccaagcagtgtcacaatggaagatcccgcatccgaaaggttgttaaaggcatccgccgtgatcgcaatggaattgcttaaggttcctgcaagaaattttccgataaagagcactacattaaaaaatattccaaccacaccacataacattccataagattcacgctgttttatcttgtcttcggaatctttgatgaaaatttttgccagtaatgttaccatgtattatctcccctttgttataatgattattccaattttcccatatgtccaaatggccagtaggtaaataatgcttttcctaaaatcttctctttcgccacataggtattctgccagtatctggcatcccaggagtcattccggttatcccccatcataaagtagcagccttccggcacttcaaatgtataaggtcctgtagcaactgtccattcctctttcagataatcctcctccaaaggctctgctgcaccattgatatagatttttccgttgtcaatgttaatggtatcccccggaagtccgatcacccgcttgacgtatatctcattctcatcatccggataccgaaataccacaatgtctcccctctgcggatctccaaatacatatgccagccggtttccgataaaccgatctcccggcataatggtattctccatagaaccggtcggaacatctgcattgataatcagaaagtttttgatcagcagtgccgccacaagtgcgattgcaaatgggatcatccagctcatgatctctttaaaaatagagttatgctcctcatcttccccacgttttttctgtgtctgtgcgtcttcggcagactttcctgcttcctgctctattggatcattaaaatcttctacgtgaaattcttccattctgtttttatcctcaatctgtcttagtttatgatcatctgtaacgattcagtactttcacaattattttcaaatttgctgaatagatatattttatcataactgcaccaaaatagaaactaaaaaagactgccggcagttttacttttacataaatctgcctgacagtcccaacgttcctgacatttccgcttaaggaagtgattaatattcttcctcttcgccttcttctttctcagaaatatcgtttaccggtttttccagtccctcgattgtgatgtgattcttctctgcataatcccataatgctgcgtgaattgcttcctctgctaaaaggctgcagtgaacttttactggtggaagtccgtctaatgcttccataacagctttgttggttacttccaatgcctgctgtactgtttttccttttacaagctctgttgccatactgcttgttgcaacggctgcgccacagccgaatgttttaaatttgacatcctgaatgattccattgtcatcaatatcaagatacattctcatgatgtctccgcactttgcattaccaacagtaccaacaccacttgggttttcgatctctccaacgtttcttggatgattaaaatgatccattactttttcactatacataatatttatcctgctttctataaattataacctgttattatatgttctgtccttctgctttgaatttccatcttttatgaatattctgctgacaggcagattatttgttctgtttctttacgaagtcctcgtataatggagacatgcttcttaagcgctcgatgatctttttcagttcatctaccacaaagtcgatctcttctactgtgttcttctcagacagagtcagacggagagaaccgtgtgcgatctcgtgaggaagtccgattgcgagcagtacatgggaaggatctaaagatccggaagtacatgcagaaccgctggatgcgcaaacgcctgcctgatctaataagatcaacatggattcgccttcaatataacggaagcatacattcacgttgtttggaagacggtcatgtctgtcaccattcaatctcacatacgggatttcagctaagatacggtcgataaggtgatctcttaagctgatttcttttgcacttctctctgccattgtgttcttagcgatctcggctgcttttccgataccaacgatacccggcacattcaaagttcctgctctacgctttctctcctgcgcaccgccgtggatgaaggaaagaatcttgacaccttttctgatatacaggacaccgattccctttggtccgttgatcttgtgaccactggcacttagcatatcgatattcatctcatctacatcaatcggaatatgtccaaacgcctgaaccgcatctgtgtggaataatactccatgctcatgtgcgatacgaccaatctctttgattggctggattgttccgatctcattatttgctgccataatggagattaagatagtatccggccggattgctgcctctaactcgtccagttttactttaccattttcatcaacattcacatatgtgatctcgaaaccttttttctcaaggtaagcacaggtgtgaaggatagcgtgatgttcaattgtgcttgtgatgatgtgttttcctttggaagcataagcgtctgcagttgcctttaacgcccagttatcagactcgcttccaccgcctgtaaaataaatctcatctgtcttcgcattgatcagttctgccacggaagttcttgctttatcaactgcctttttgctctcagatgcaaaactgtaaattgcagatggattgctgtatacttctgaaaaatatggaagcatctcctgtaacacttccggatatacctgcgttgttgccgcattatctaagtaaatcagtttactcatatctttgtacctctttctatctctgtattagtttgtaattgatactagactcgaatttcagttcaaagctgaatcctttttctatacgaatggtcttacactcactgtatatttcctagttatttgatatgatataagtattataactcattatttccccttgtcaaggtaggaattgttttcttttctgtacatgtgccattattgtttcccctcagattttccggctatggctgcatatgaaaacgaaatctgttatgataattcttccagttcactgaacattttcatcagttctttttccccgtaatcgtcgaagttgacggtgatcatcatgtcatcttccttcacaatgaaacctgtgccgtatttcggatgacgaacccggtggggctgttctggcacaggattctctgatttattttcttcccgtgccgccatgatctcacgctttaagtcctgtaaatgcgtcgcagaagctttttcatcctttgccgaaccctcgatcagttttcccggtatcatgcgaaggaaacggcttggtcccggtgtcgcccggtactgtcccggattggtataataggaaagttccagatgattttttgctctggtgattccaacaaaaaagagacgctgctcctcttcttcctcctcaaagcttttcgtctggagcggaatgagcccataattgacacctgtgataaatacatgggaaaactccagtcctttggacgcatgaagtgtcattaattttaccgtgtcttcctcattatgtatctctttttccaaaatattctttccagattttttaatagaaacttcaaatggaatcccttctttttcaaaaacacgctcaaagatctcggactgattctgcaggcgataaaaaatggcgatctcccggtatgggattccagatgcatgaagttccctgatcctgcccgcaaggtaatctgcctcctgaaatggatcatacatattccggatctggattttgtctccgctctctgtaccgccctgcagcgttcctccctgctgcataaaacaacgtgcaaccgcaagaatctcactgctggaacggtaattgaccggaagcgtcagttccgttgcctgatactttgtctttaactgataaaaaatatggaaggcacttccgcgccagctatagatcacttgatttggatcgccgaccgcgaaaaaactggtttccggttttttcacacagtcaatgagttccaactgtttttcatcactgtcctgcacttcgtcgactatgatccatgtgattttttttccattggcattctgaagcgtccgtaatttgcatgtattttctaacagttcgtcaaacgtcattttgtcctgacgctgtttttcttctttcagtaatattttcagtgtgtcgatatcgtcctgatatttgctgtttttctgttctaaccgttttttcaaacggttcttatatttgattttcagttgatgctctgtgatcagctgctctgccagttccagttcttcgtccgggtccattacctgaaactcttttgtgtaaccaagcgtttccaccggaagcattgtctttaacatcgtaaggcacacactgtggaacgttccaaagccccagagctgttcctccgggatatccggttctaatgccagcagccgttccttgatctcatctgccgctttattagtaaatgtcagcacaaccatctgctcatacggaatctttttctcataatgcagatacataactttcgtgatgagaacggttgtcttgccactcccaacattggcattcacgagacaggcgctgctctcgtctgtcactgctgctttctgatattcatttaagcgatctagctgctctgtataattcaatgttgctccttatctttcttgcattttttgtattcaatcttatagatttccaatccgcagtccgattgattttctattttcaattcgatagatttttatcatcttccgcctctatagccgtacttcagcagatctactttaccatccaccacttcaatcccgtctgcttttaacagttcttcctgcacatgttccccgccaaaggcaaatgcccctgcaagttcccccttggaattgaccacgcggtagcacgggatatgctcagggtctgggttatgatgtaaggcattgccgacggctcttgacattctcggatttccggcaagttctgccacttttccataagtagctacttttccacgcgggatcgtcttcaccgcttcatagatgcgcttcgtcgggctgtccgtgatcagatcatagctttctgcgatcatttgctttatctctttctctgggatcgttccgtctaaaatgatcgtgttccagtgttccttattctgatgataccccggaatcacagacgcataggtgtcacgccagaagtctctccactccgggcgaactttcacgttcagattgatatagccgtccttttcatatgtccataaaaatgcctttttgcttccgcgcacacggactaactgccagtttggatcatgaaaaggtgtttctgtgtatgtgtctggaaatgacaagccataatttaatgcttcttctcttgttttcataattatccacatttgattttctcaatgtttcctttgtaaaacatattttctctggattcctgtctgatcggctctatctttgcgtgtatgagctgatattccaaatgttctatccacagtatggtaagtagcagccatccttccaacatgctagaactttgactcatatctcctctgcatcttctccattgcctccccgtccggttcctttgcatcctcagataacgccacctgaatctggaaaccagccggtacatctgcatagtaactgatgatattggcaaggctcttccggttttcaggctccattacccagtctgcgtaaaaagagctggctaattttaaaataagcatccggtcccttatctccaccgacggaactgtctgtaaaaaagctgcaaaactctctccgttttcactgatttttttgcaaaattcctgccactgctcctctaatttttcaaaagaaaactcttttctgcggaaggtggacggtgcatactctgccacttttacatctatcggaacatcccagtgttcaagcagattttctaagccaaaaagtaccatttgcttgtcaagtctgtggtcacccacacaggctgcgcagccgtctttgcagccacatccttttacaagcttcactgcattatggatgatatcgtccattttgtcatatattttttcagaaaaaccaagtccacccacatatttatcgtaaaaataaatatccacatccgaactggtgtcaaatgcaagctccagcgcattgtttgaagtcacaacaccaatgtcctcctgctctgtcatcgtcaccattctggctgcatttttcagggcaaagcagacaccctcataataattgctgcgtacctgttttgtattctcgttcacctgaatcagcccacggtaaaccttcactacattctccggcacgcgcatccaggtactctccgtgtcataatccttggaaagtgctttcggaagctgctcatatccgagattctggtggttgtggaactgcattttcttaaacatgtaaacatagtcactgacattgacatctccaaaatgaagttccgtgcgggccagtggtttgttcttactctcatggataatcttcacattcgcttcccctgctgcgactgtgtaataatttccattgaaaggtactgcataagcagtcctgctttcaagatcaagctttgttacctgataagccaccccgtcatgcatatagactgcaccgtcatgaagttcgcggaacgcctggctttcatccatttctgtaatctctttgccactgtctttatgtaaaagtttgtaacgtttttcatcaatattgcgcatggaaaaatcacctgccggaaattctccgccagaccatgcaaatttgccattgtaactggaaagttcctctgcccggagcaatactgggattgcttctccaagatccgggaacaaagaaatatcatctaacgtcagcggtatctctgccgccgctgcccggatatgcgccagttcaatgattagattattcttatcgatcactgcattttcgctgctgccctcaaacagccagtccggctctaacgcaatatactgatcaaacggctggttatccagaatcaggtaattgctgctcttttttccacttcttcctgcccgtcctgtctgctgccagaacgatgctctggtaccgggatagccgactaaaacggtggtactgatttttccaatatcaattccaagctccaacgcgttcgtggaaacaagtcccatcagctctccggagatcatctgattttcaatctgttttcgttcgaccggtgtgtaaccgccacggtagccggacacttcttctgccttatgcgttccaaggaatccctctgcctctagatgatcacgtgtctcctttaaaacgatttcgacattttttcttgattttgtaaaagcaatgaagttcttcccctcatccataagttccggcaaaagttctgccgccactgtcgtaatacgcacctgaccataataattatcatccttgcccataatctttggcggctggatcagataatatccacgctctgccgaaggcgagccgtctttatccacaagttcaaactgctttccacagatttcggttgcaagctccacaggatttgcaatcgttgccgaactgcacaaaaactgcggattggaatgataataccggcatacacgtgaaagtctgcggaacacatttgccagatgcgagccgaacgctccgcgataggtgtgcagctcatcaatcacaatgtattttaaattggaaaaaataaaatcaaacccatacttgctatgatttggcagaaacgctccatttaccatttccgggtttgtcaatatgatgttggcactctgccggattctcgttcgctctgcgaccggcgtatctccgtcgtacacacccgctacaatgcggtcttttccaaaatattccagataaggcttgatcgcacgatactgatctgccgccagcgccttagtcggatagataaaaatagctctcgtctgcggattttttaagatatcctgcaaaaccgggagcagaaagcttaacgtcttgccacttgctgtcgaggtagtgatgacgacattctttccggaaatgactttttcaaacatttctacctgatgacagtataacttctcaatcccatgttctttcagataatccccaagctccggcagaagattttccgggaaatcgtcgtacactgccgggtgcgcaggaattgttttttcatatataatacagtctttgatatccatataaaatcctttttaaactactacttctaaaatctttttccctttataatcgatttccttcacacctgtctgcttgtttttattaaaattaaaactcagcagatatcctctgtcacttttatagaaatccagatattcaaagagctgctgctcacctctcgtattatattcttctccacgccagattttcagttcaatgacaaactgcactcctctgtagtctacaattacatctgtcctctgattgtctcttgttctcgcttcaatataataatttccagttccattgatgatcggtttcagataaagcagaaaaagtttacgtccattttcttctacaaattttttatcattatcagaatagatttcggaaaaatactcataaaattttttcatgaccaaatccatctgaagcattccattttcaataaactgatttcgattttcctgtgcttcggaatacagtttactctctactgccatctgtgacagcagcagatcatacatctgaatctcaaaaatgcggtttgcaacaaccaccaatccatccttttccttaaggaatccgaaggtaactcccagttccattaccggattttctctcttgaacggatatgcaactccgtcaaataacatgttctggatcatctgctttaattctggataatccagaagctttttagtcatatcgtcaaacaaggcatttggttctttcagtaataatttcattgctgcaagaatcccttctcttgtccatgcccatgttttatccgggaaaccttctgtcccggtaactctttcgtccacaagctgacatagctttgaaaccagatatggataacccgatgtatattcatacagaatgtgacttatcacaccgatatccatatttgtcttataatcatgctcatactcttccagcatgccctctatcttcttttcagagaaactcatatccgcatgaaaatccacggcaatattccatggactgttatactttgtctcctcacccggatgcagctttaatttcagagttttcacatcatacacacctgcaagaatcacagactggaaggtcttgtcttttccctgctggcattttaaatatttttcgcggagcagtccaagaaatgataaaaatatctgattatctgaacttttatctacttcatcaatcattaaaacgattcttttctcacaatcttcacataaatacgatattttttcgcctagagatctcattggaaatttttctgataacggctgattccatttatccagaatttctttttcaacattctgtgcacgaagacaatctccgatatccagcacaagtccttctgccagacttgccagcgattgaaaatattcatctgccgcttcaaaactaaggctcagaacaatatagtcctccttcaatttacgctccagcaaatataatgttgtcgtttttccatattgtctggcacgattaacagtaaaatattttccattttcaatatactcgctgatcatgtaatccacacgctcactaatatctaccatataatttttttctggaatacaggttccggtaacgcaaaatttttttgccatgaaatgctcctatccataataaaattgctaagaatgttctactcctatgatacactgaatccatgaaaaaagtaaatctattttattttttttctaatactcaattcctatttctttgtattctagtaacctcgctttccccataggaagttccatactgacgcctttcattgtaccatccagtattccatcgactgctgtcaggaaatcgtgaatcacctgtttttccaccggtttactatgatgtcccggccatgtaatatcataaaatgtttccagatcaatcagcttttgtagagaatccctatatgcttccatcgttgccgcatattccatctgcagcagcacatgcgctttacaacaggtatcacctgtgaacatccatctgtttttctcatccagaaaacagacagagccaatagaatgtcccggtgtctttataacacggacagttctatccccaagttcaaaagtcatttcatcatcataatacttgcatgtttcttttactggcaaaagcttatcctgcgtaaaaatacgtcgtacttcatccttactatgtgctgcatataattccttatccgctttctcaagccatacttcatcaaataccccggttcccccaatatgatccacatgaccatgcgtcagtgccaccacaatcggtaaatctgtcagctcttcacagatttttcttagcggaatcgttccaaacccggtatcaatcaaaagcgccttgttttttcctgtcagaaggtacatataagcactcgctgttttatcatattcttcaataaaccatgtgttatcatttaatttttcaacattataattcatataacacgctccatttcacctgctgtcagcttcttctcttttcttccatctgcaatcttcgttttatcaacccggaatcagcaatttatcttttgttccttcttcaattccagcaagaaaagaaaaggcagaatctaacatctgttcccaatagtagaattcatgatctccatgtccttctttatagatatgaggaatgcgttctttctgtaatgcgttttctaatttttcgacagctttgtatactgcccgatcttcttttccacaacacaaaaacaattccggtctattatccacatcttttcttgtccattgtgtgcacatgtcgcattcgcttccatagtaagcctctttgtttccgaaaattccacagaactgctctttggaaaaacctggtgcattcgcttctgccaaaagcatatacgcatcagaggccggcgaaaatgccaccaccttagaaaaagtatcccggtacttaaagccattatacaaagctccataaccacccatggaaattccaccaataaacgtatcctctctctttgtagacaaaggtagtaattttctggccacttccactaattctttccccacataagtactgtaaaacgtcatgcggtctggcatatcctgataaaacaaattctctccatccggcaggacaatcgcaatccctttcagttcagattgtcctctaagtccgagataagtgattagttctgtcgctgttgcgctgtaacccggcaacaaatataaggttttatatggtggctcccattttccagccatcccatccgacggcaggattactttcacattcactccacgcattaatgcttctgatttataatctaattgcaaaaaagccattattctcatcctccaatttttatatgattatgctgtcctgctattttcacttatttcttcatacaaacgtgttttatttaaaaataagctgcgcaaagtcatagatacacctgcgccatacattccagtcatgtgtcccctgatacacttttcgaatctgattaattcccttctccgaaaggatctgatcgtcatgctcgaaatgttcccagaatgggtccttgtcacccattgctcgaaaataaacatcaaacttcttattaaatgcctctgcatcatccagaatcttcatatgctcattctcacttgctctccgatcaaccatatcaagtggacttccctgaattatatcggacacaaaaccgctgaaaatccctaatgaactaaaatattccggatgcataaatcctataattcttgtctgaagcgatcccatagacagacctgccattgcgcgcattttttttgttttaccaacacggaatttcttttctacataagggataatttcccctataagctgtttttccaataacttgaagtcaacaattcttcttccgtccgcatccatcgtctgaaccattccgttactcataacaatgaccataggaactgcttttttttctgtaattaaattatccagaataaagttgacttttcctgaagcagtccatccaacttcattttcgccatgaccatgctgaagatagagaacgggaaactctctgtcctgttctttctcatagcaatatggtgtgtatacaatacagctctcccactctccggttacttccgagaaaaaatattccctgcgcacacttccatgcggcacatccttgatctgataaaaatcttccgattccatctcaagtgccacgtagttatacggacggctgtagccgtaagtaattggaagtaatggtgtcaccacctcaacatcatcaatttttaactgcacatattgaattccaacccgaagtgtatactctaatctccagatccctttttcctgtctgacacatggaaattcttcttcattcatggtaaatgttactttttgggcttccggagctgcaatttgaaggaaatatcgcttaccttcttttacaattgccggaacctgtccttcccatggaagaactctgtcaaacccaagtttctgttcattcatattataattcattctttttttctcctcgcctcttataagttaataggtctgcatatggctgtgcagacctattagattacagtatttatatttttttaggaattacaatgtttttgtctgtccgtccggtgtgcactctgtgattacatattcaaaggatgcaagatccactgcaagttttgcctgatacccgtcattctcccatataaattctatcttatttttttctgaattaatggtaatcttactgtccatagcaaatgcaggacaagtatttctaaaatgcagcaactctaactgtcttgccaccactggctgttttaatgccttttccatctgctctgctgtaaggttcgtgcgattgatttctttatgtccacctgctccggcacgttttacagcctcatgatcattctttcctgcaaaaagatcaagataccagacctgtggttttcccggcatgaaaagctgcaaagctctcgcaagcagcatctttgcatcgtcttccccaagtgcactgtaataagtagcatttacctgataatacatgttcttctgtccatgaaggtctttgacataaccgccccttccgacaatcgtatcgatcaaattctggatacgttcttctgacaataaaccttttaaatcaagaagcggaattccatcatgacatcctaacatgtttacggtacgaatgtctttttctattaattcttttgcccagtcacaaaggtgctttccatcaccactctccaacgcatcaataatgagccccggaaggaaaaagtcatacgtcatataacctttctctgcaatctgttcataatttttctcaccatagcttgcatgaatctccggcaataatgtcagattgtatttgtcagccagtttgcgcactttttcaagcagctcccacgttccaggttcatttaggaaattcttctcaccaggttcctttggagcataggcaaacgcatccagacgaacaatcttcgcaccataccctgctaatgtctttaatgtattatcgtaaaactcccatacaagcggagatttgatgttaagatccatctgacctaagtatcgtctgcctgcttccatataatcgatgacttttttcttttctccgtcagtcataaaacgggtcacttcctgattttcctctgccaataggatctccgccggtttctttccttcttttgtctgcttgtttaatgcctccgcaagcatcacggcttccgtatactgtaagcctgccgcctgcatcagatcctgtgcatctaccatgcggtaggtcacttcctgatagaaggtattccagtatgggacatcccttccatccgggaatcttaccatcaggattggtaatcccggtttacggaaaaacatgtccttgatatatttctgatccggctggatataaccatcctctgtcatctccccgcagccttcccagaacttattccagtcgatgaagaaatcacggtattctgatttatcaccattttttatgatatcctggaactgctttgacagtaccgatgcatggtttaagataaaatcgagttttaaatcaatcccaagtccttctaatttgtccagtgcttccctggatgcaagcattttatttaaagaatagtcgatcacagaaaaccctctgtctaagtctgtatggaacagacttggcagcacataacaggaagaaaatacatccttcatttccggtttctgtaaaaatgctgcgatatcatctaacgtgccgcccatgctgtccgggtaggcgtttaacattggtccgatattcatggttatcttccttcctccatctgctcacggtattcttcatagcttaacagctctccgctctttgaaatgatgatctttgcctttggagcctgatgctctaacatcgcctgctctaattccagtaccaccatggtaaatgggctgtctgttgcaccgtccctgtttctcgctcttctgtgtgcaagtgtctcctgtggcgtgctgttcaataaaacagggatatccacacccttatagttatcgctgtttccgtgtgtccattcgatcacgagaacctggattttggagaaatctactttttcataccataattctgtatcttctcttcccatgcgtttcagccagatctcatcagtgcctgccttgaactcttttacgatctccccgacttcatcgaatccgatctccttgtctgttccgaggtatccttttaatccttcttttccgtttcttaagtaagactcataccagtcatattcctctgtgtgttttggattggcatcatctccgtttttctggaattcatggatcacttcaaaatgttctgctgtaaaggtaccttcttttaccattccttttaacgcactctcacgaaaggtatgaagacgctctgcatcattgtatacagggattctgtgtggataattgtctccggacagggtgtagcttccaattcctgcctcttttaaatagaaagataataaagaagcgatctctgatttcccaactccggaacctccgcaaacggtaagcacaacttttccggtctcggatttttcagaagcttccgccagcattggcagcaattccttaaaaataacgtctgctttctgaacatgtccttcaccgatatcgaccttgtctcccggcatatcaccatgtgcaatatcttccggtattaccggtggctgccagtctgtcatgttttttgtaatttctgcaattgatttcatcttcacattcgtctcctttatctgtctgattccaataaccattcgattgccggttctaagtattcgttccagaatttccagtcatggatccctgtgctttctttgtatgtaagatccactttgtttttcaaaaggaaatcacggaactcatgattttcattcagtaagaaatcttcagatccgcaagccatgaaaatcggctggatcttctcgcctttctttaatctcttatttacaatatattctggattgttttcgctttcttctaactggtcaagatcaccaaagatctgtgcataataatcataatctgcaatatcgttgtgtgtacccggcttcattcccttgattccgtttacaataagtgcagaagacagaccaaacatttttccgaaatattccggatattttaatgctgtatgaattgctccaaatccacccatggacaatccaccgataaagttgtcttccggcttatctgacagttcgaatgtcttctggcaatatgccggaagctctactgctgtaaatgtctcgtatccacgtccagttccttttccgtttaagtagaaactgttctcaccagccggcattacaactgcaaggttgtattttaaagccagctcctgaattaagcttcctgtaagccagtcctgtgtacttcccgaaaaaccatgtaaaagatataaggttttcatcggtctgtcataatttgaattaccagccagcatctccggtggtgcatcgttcggtaatataatatgaaatgtaataattctgctgagtgcctgtgaaaaagcactcacctgtaataatgccatgatcgtttacctcgcttatttttctagtttaaatatactaggtttgttttctaaattctttcaaaaaaaagatatatattttcattttcctgatattttctactaaagcatctaaataactcaacttttccaccgacatatcaagtgcaaacacttgattttcaagcatagcaatttcataaattcttatactggtataaaacctattcctgtttctgaattccaaacacaaagaacagttagtctcaaaacccacatactatcggttcctaaatgtactcaattcatgccatcggcatggtaaaacagttgcattttttattttaaatctaaatttaggacaaatttcggattaaccttatcaaataattcaacaagctcaaggtcgtgatttgtaacttccctgcactccctgtcgataatcatggtattaatcctgtcttcttcgcatggatgccactgtggcagatattcacagtttggatctccgtttcttacaaagttaagtaccattgtgctgagcgtttcagaatactgctgaccatatttttcctcattgagtacataaaccctgtcttcatttctgaaaatataagcaacttctcctccatgccagattggtatacgtccgccttccggaacggtataagatgcaaggaaattatataccttattacagccagctttcatatgtgttctcactgatttcacagcggcacggcggcaacggctgtccatatatgcgagatctaaaatatcatgatccgggtatgcttttctgaacatttccatgagtgtttcacaggaatccccataacggtctttcaaatatgcaagctttccttcttcgtcctcattaagtgccagtttttcctcataagtcagttttacagtaggcatttctccaagtactgatccataaatgatcggcttgtcttttgaaaatggcattaatccgacttccgccgggaatcccgggaagtaatcatttggcaccggtgaccagtcaaaaggattggatccggtagctttaagtgcttcgcataaatcttcataaggaacatcatatactttctgaatgttatctttattgattccaagatagtccatcatcttctttgctgtttccctactggctgttccatcatcaaggtgatacgcttcatcggatctggctccgcttaatacgatacctctctggaaatatggtgctgcatctttcagctggaaaaggcattgtacttttccgccaccgccagagtgtccacagattgtaacattctccggatctcctccgaatgcagcaatattttcattaatccacttcattgctaccactaaatcagcaatacccacattcggggaatctttgaactcttctccgtactggtcaagatttaaatgtcctaatatattcagtctgtggttgattgaaacaaaaataatatctccatgtcttgcaaggttcgctccttcaaaggaatattcttcaaatgcgtttcctccgaagaatccgcctccatgaatccatacaaataccggttttttctctgctccaccctttggagcccagatattaaggttctggcagtcttcactttcttcctccagcatgtgaagtcccctgtaggtataaaaaggttttaatttaagaacctgttttgaaatcggtccatgctgataggcatttttaattccttcccaaggttcgatttcaaccggcatctgaaatctttttgcttttgcataatcaattcccataaaaatattcactccaccataagcgatacctctgatttttccgcattttgtgtccacaaccggtctttcttcttcaaatacatactgattcatataattctcctcctgttattttataatatatcctccagatgcatccatccggattctcttctacatttcaattgccggaagcagttctgtaatctcccccggttttacttcaactgttttctccgagaaaattccaccaagccatatgcttgtgcatgtcgggttaaaaacttttgtactgtctactgaaaaaatcagctttctgtatgcatctacataactctggatctgtccgttcgttgcataccatacatcatctttgaaagccactttatccaacaacttctccatgtgatcccagttatcgttctggtcaaattcataactatgtccccatatataaaacaattttgccggactgtacatggaaaaataaaaatcatctgacaaaaaagcgtctgcaagttccatgactctttcatcatcatgatgacaggttggattccattgcaaaaaatccagtgggatatcaaatttataggtagatgtgattgttcttgcataagagattccgcttagcctgacagcatttaaaatattctcgtctacagcaccaaatgcgtatgcaaaaccggtcaatggtcttcctgtaatctgttcaagctcttttctgcatgttaagatttcttctgcacatcttgctgtatccatcccatacattgactcatgatttactccatgaccagcaacttcatggttttcataaagcctgattatctcctctgcaggtatttttatatgatccacttctttttttcccgctgccacacgtcctttccttccaaacagtccggagttcaggttaaaagttcctctgacttttctttcattcatcatccgtactaacctgcgatcctgttcgattccatcatcataacttaacgtgaatgcttttctctttccttccggccagtataatctgtcatttatctgaaagctcatatgttatccccctgttttatctgataattttgtcagctcctgcttggatcatctcttctatctgctggaaatcctctgtcttatcaacacctgttaatgttacaaatgtgtctgcctcttccagccttttattatctttataacggtcaagctttgtactacagaaaagttctatccttatttttgcatttcctgccagatgatagatatcttcctgtccgccagataccctatcaagatctccgaaaaccgcttttaatgattcctctgactgatgtctgaatcctgcctcacggtttttactatccttgcatcttccggcaatatcaagttcgccattaacagcaaaacatcctgcatacacatctggatgcttcattgcaagctttaccgcaccataggcacctgtatggattccaaaaatataattgtcttctttcttttcactgactggatataaaaagcgaaaaatttccgggcattcttccacaaggaattcttcattctttgtgccaaatgccatattggttgcaagcgaatgacttatcatcggagcaattacaaacatttttttctcttctgcgattttttccatcagtgccgcatgacgcatcaaatcaaaggttcccgtcccatcctcatgtatcatccacaataccggaaatttttcctctgtcttttccacttcctgttctgggaaaaaaacatgtgcctcaaaagttcctgccagtttcactgataatgcatggatttctatgtgtgccatttatgcttcctccattttaaatacattctttaatggaatccattccagaaattctttcacctttttatcacaatactcccagttgtgtctgccatgatctctgatatctataaattccaatcctgcctgatgcatccattctgcctgactgtaattatcaaatgcaatcgcatcttcctgtcctgtagaaatataaaattctggcagatctgtatgtttttttaaatgttgttcgatcatatagaaattatcatccggcgtatttcgccggtcttttgcagaaccaaaagctgcgatcattgtcttaaatccttccgggcatggctcattttcgtcttctctcagaccaatctcgttctccttatagtgtaccggttcatgtggaacaatccctatcggtcccgaaaaaacaccacagcaccggaacttttccggattgtgcatcgcccacttgaatgcaccatagcctcccatggaaaatcctgccacaaaattatcttctcttttctctgacagtggaaataattttacagccagtttagatatctcatctgtaattacagaaaaatatttgtaatctccatggatagtatccatatatccggaataataggcacttggcatcacaactgcaattccagcctgtgccgcatataactcaattgctgtatatctctgccagtccgtataatcaaacccaccgccacataaaagccagagtaccggatatttgtaatctttcggacgctctgcaagggaatatccccacttattttccgggatgatcacgtcgatccccatttccatttccatcaattttgaataaaatgtaatatgatttaatgccatgatctcctcctatgtaagatatgttcggatcagatctgccatatgccatgaaatccgtgatggatgatctgtagcataaacaactccatcacactctgacacgcttagtcttaaaaatcttctggcaaaccattccagggaaacacacagttcattctctttcatcactgcttctgcatacatcgattccacagaattgttgactatgcaggcaatatttccctctgcgaactggatttcttccacttcttctgaaataatttttccaatctgtggtgcaccatataaatatgcaactcttccattttcctctgtcttaagcctcatatgaaaaatctctgcgagagaacttaccggaatatacgcgtatgaaccacggacaatcgcatttccatttaatccgtgatatttaattttttcccagaagaagcatggtgtatggagttccatgataccattgtttacccaggcttttctgcgatcttttgcaactgcaaaattcacttcgtccacacaccatttttttcttggctcactgtggtgcagcctgccactttcatctttataacatccggaaaaaagataatcccataccaattcagcatcatcaaaagtctgtccgtgatccctgttttttacatccatcagtacattattgccttgacttcccttataaaatgcaaaattatactcatcacgaatgccaatctgtggaagtgcatcacatccgtttaccagattccagtactccagattataccggatagtctcgtgatctccttccctgtagtgtggtggaaccttgtcgagttccagccttgactgccagatatcaagaggtccggactgattgattaccttatgtctgttatcaaacagcaattttgaattagttggacaccctgagcctgctgcaccggcgagaatacttcccatatatcgtgcaaactggcctgtcatggcatttcccattgacattccctgcatatagattcttccggcatcaatgttgtacttttccttcatcttttcaattaactttactgtttttttcacatcatgataatcttctacatgattttccggcttatgaagcaagggaacatcacctgaaatctgtcccaatgtctctatgactttttcccagtcgcattccatcatccacattctttttgatgctgcattcggaaatactacaataaaaccttctctgtctgccacaagtgtccaggaagtataaactgcctgtccccagccggtcatcagtcctccatgcatggagactacaagaggtgtctttttctctggatcataagagtttggaacatattcataccagacatcttctatatcatctgcaagcaccgccctgtactcttttaaatttcccggataaacctgtgaattgtttccattttcatttactgtcgtttttccatccaaaagtttctctggaagataatgccggttttttgtatcacagattcccggtattaactttatttttttatccactttctattctcccctctgaattttttgcccttggacaattaactattgggcatcactctttaaaatatcatgtaaaagacgttccatatgtgcagacagtacactgtaatgatccgttgcataaatcatacttccgcatttcgaatactgaagtcccatcacttctgccacaaaccactctgcagatataaacaatacattttcccgttcaactgcctctataaacatagagcgtacatggtcatttatcgtacatcctatacatcctcttgcaaactggagtttttttccattcttcatatttgcataaatttttcctgcttcacagataacagatcctccaaatgcttccacaagatcagtaaccggaaccatagtataaattgcacgtaccaaagcatcaccgccaagaccatgatattttaacttcttccactcaaaggttggggctgacagctttgttttcttattgttcacccacgcatatctgctgtctgcctctactgcataattgatccggtctccttctcttttttcaatagtttccatatattcaatggatccatctgcctttcttcttgttccggaaaacagataatcccagcagatttctgcatcatcaaacgtctgtccatgatccctgttctttacatcacggaatatataatctgcttttttccctttataaaaagcatagttattttcaccatccagttttatcacaggaatctctttacactgatttacgatcagccagtaatcgcggtttcctgctacaatatcaagcggactgtctgtacttccaggtggtgttccgtcgttttccattcttgtctgcaataccggaagcggtcccgcatcattgtttggtgtcccatcttccctgaacataagtcccattgttccaggtcctgctgaaccttccatcgcagcaaatttattaccgaaatgtcttgccatcattgttgtcatcgcattgccgcaggacattccctgcatgtaaatacgctcttcgtcaatattgtattcttcctttagtttttcgatcagtgcaaacactacaagtacatcatgattttcttcaattggagggactggattcatatagattccctcttcatttggagccgacaattccttatataatttatcctcgcattcgattgtccagaatctgcgaagctgtgcatttgggaaaatacagatgaatccttctctgtctgcaatatgtgtccacgatgtatatactgcctgtgcccatccagtcattagtcctccgtgcatggaaaaaacaaccggtgtctttttctccggattataagattccggaacatattgataccaggtgtctacaaactcatccacaagagccccttttttctcctccagccttttgggatagacctgcgaattatttccattttcattaacaacaatctcgctgtcttttaagtattccggcagataatccctgttatcatcatcaggaattcctggaagtaaattaatcttcatcttcttaagccccctcttagccctgcaaatatattggttctctcttcaatggcagccactctgaaagtgcctttttcaaataaggatcccagaaattccagtcatgtgtatatccctttacctcctcataatggattgggattccactggaaatcaatgcatccctgtctttacgcacaacatcacgtataaaatcattttcgccaactgcgatataaatatccgggagttttgttccattttcaacggctcttcttgcatatccgccaagatcatattgtccgtcccttaatttatctggattaccaaatgtactctgcagcctttccatcttaagggtgcgtacctcatctatgaaagcgtctgtatccacgctgcatccgattcctccggaaagatctacgcatgccgcatacagatccggtcttttcaatcccagtgccagggagccatttcctcccattgcaacgcctgccacaaaattatcttctctctttggggaagatgggaacatggtctggatcactttcggcagttcttccgtcagaaacgtaaaatatttatatccatactgtgtatccatgaagaaactgtcgtttgcctgtgcagtcactgtcattacacagttttcttccgcataacgctcaatatttgatttcctgacaacacaggtatcatcatccccgccaccatgaagcagatataccgtctggaatttcattccgtcccggtattcccactttcttcttgcagcaaccccttcttctctttttatatccgtcaatggataatacgtcagttcttctgatggcaatgtgaccgtaatgtttgtatgaaggctcaatatttctgagcggtaactaaatcgtagtaaacccattttatctctcctccacttttattgcttctccacgggaaacaagccagttatcttcctcattcagtctgagtttcatagatgtgattttcataattcccttctggtactcaaatctcatttttgtttctgcccagctgttcacccagtgaatccggatctccagaatatatggcttcacaaatcttgcagttgcacaataattttttaactgtggaaatacattatctgtctcccttaagatcagttccccatccatggaagctctaaaaacagtatctttattcactctgaaaatacaatggtttaatccaaattcaaatgagaaatctgtcatctcttcctgctttgatggatcccgatatattgcaaaaaaatcttttccaccaggcggtgccattccgatccatggatctgcatccccggagatcactctgtatactcctccaaaattttcatccggctgtattttatttgttttgtctttttcaattttctgactcttttcaaatctaacgagttcatcataagctgccatattttccggcaggctttcatcctctgtctgaagaagcatctgttcatatagcacatccagcgtttcctgtggaccatatggtgcaattcccccctcatgtactacaacacaaagttctttttcaggccagatgattccatattgtccctgtccaccatcaaaccggtatacacccggaatactacacgcccaaagctgatatccatacccacatctgccgtctttctgttccggtgcctcatcggtcataatccggacagaaagtgcctcacggataaattcttctgaaacaatctgttcgccattccatcttccattgttcatatacagaatcgtcagacgcagattgtcttctgttgtagcaaacgtagccggctccgcatcaattccatttggccatttcaaccacacaaatctctccgcattaatccctattttttcaaatagccttggtgtaagataatcctttacattctcaccggtctttttcttcactactgccgcaagcatgcatgctcctgatgtattatataaaaacctggtgccaggctcatattctatcgctgctgtaaaataatttgcgatccagtccccctcaatcgaaggatttgccgcatgcccatttgtcatggaaagtacatggcgcacagtaatcttctttgttaattccggtacacaaatttttctttcctcgatttcatctttaaagatgtcaaccattttctcatccagcgaaagctttttttctgttactgcaatgcctattgctgttgcagtataactttttccaaaagaatgattgctatgtaccatttcagaattgaaaggagcccaccagcattccgcaaataccttaccgtgtcgtgcagccataaagccatgcatctgcgtagtctcatgcatcaattcttcaatgcatttttttacctgtctgcttgagattcctgcctcttccggtgtaattctctctaacgccttttctacttccattttacttttcctttcctgttacaagaatgaaaaaaacaagtgcacacaacatcaggactccactcaggtcaaataaagtacgataccctgtgattcctgtaaccgctccgatcactgctccaccgatcatcggtccaataccctggaaaatatcaccaccaagatagtaggtacttgttgccacgccactgcgcccggttccaactttattaatgcatcctgcctgcaaagaaggctgtgcagctccctgcccgacagaacgcagcacgcctgtgataaggatcagaattaatgatgtgcttcttccaagaataaacatggaacttgctgtcagcaccagccctggaagtactgtgacccgaattccttttttatccatcagctttccggaaaatggtcttacaataaataacacagctgcacaaaccgtgaaataaacgctcactccactgattccaagctcatctgcatacataactaaatacgatgcaataattccgttaataaaagaataagaacctgctacaattgtataaggcagtgcttccactgcaagaatatcgctgaacatgatttttttcttttctttgttttcttttttttcttcatggaacagacataaaataacaagtgcagctactgtaagcactgcagacattaaaaatgtcattctcattccaaaattttcagaaatggtaacaccaatcccgggagcaaccgctgatccgatgaccatgccgagtccaagataaccaattccttctcccattttgttttttggaatatacttcgaggcaagagcgatctgacaagttccgctgaatgcaaatccaattccgttaatgatgcggaaaaccacaatcaatactggattcgtaacaaatgcaaatcccagaagacctattcccattaaaatattactccattttaatagtgttacattgctcagtctgtctgcaagcagaccactaaatggtctgcagcaaagagatgtaattgaaaacagtcctacgatcacgcctgctgttgcaattgagattccgatgctcaccaggtattttgataagattgtcactaccatataaaaagaaaatgcatttaatgtatttaataaaagtaccaagatgtactgtctgttccaaagttttgtcggttctgttgtcatattctgattcataaattttccttttttaaatagggagagaatccgaatggtttccctccccaggtttaacttctatttcattttatgccttatttggatgctaaccatgcatctaactgtgcctgtttttcatcgataatgtcctgaagtcctgctgcataaagctgtttgttaaactcttcaagtgtagaatcgatatctacttctccatacataagtggtgtatagtattgagcaacaacgttcgtgcatgcagttatttgatctgcaactttgctggaatcaaactggaatccaagtgcaagggatttttcagcattttcatttttcttcttcatctgatcataaatatcttctgcttcatagttccaggtcttgcacagagttacattcggccagtatgccatgcttgctgcaggccagccaatatcagccattgtctttccttccggatacatcatctgaccattttcatcaagttcatattccagtccttccaacccgtttgctgcaatctgagctgcttccgggtctgtaaataatacattcagaactctcatagctgcttccggattcttgcagaatgggctgatatgccacatataagttgtaacatcacctgttgttgcaagtggctcggtaactgctgaaccgactacatccataccattctgaacaccggtactaggaatggagctttctgcatcccaggaataacctggagtaccatctgcaataccaaggttaacgctcattaaggttggctgattattgcttaatggatccggactgaagataccattctctttccatacttttacatgttccaggaagtttttaaaataatcagactcataataattttcaactgttgtgctgtgtgtcggatctgttaataccccaaggtaatttgtatcgccaaagtagtcaatgctctttggaatccaataaggatcagtagatccaggaataaagtatttatccggatttgctttctttaatgaaatcattgcatctgtcatgctgtcaagatcattgactgtattccagtcaataccagctgcttctgcatcctcagttctgcaaagatataagttctctgaactccatgcatagatacatgggataccgtaaatctgaccatcaatcttgccacaatttaaataatcttctaatccgtcataaatatccaagataccctgcccgtcagactttaacagatcatctaacggcattgcctgtccgtttgctgccagattatttacagatgtataccagaaagaactgaatatatccagagaattctccccacctgtcaacataaggttcaattgtgtagaccaattggcaaattcgatgccgaccagttcaatttcagctcctgctttctctctcatgatctcatttaatgcatcttctactttatcagcatcaaaagagtcaaatacgattgtatacggaactctgatcaccggatattccccatttgttgatgccgtttccgttcctgctgcattactatccccagatgcaccagttgtttctgctttgcttccgcatcctgctaccagtgatacaagcattcctgctgtaagaagcattgaaattaatcttttcttcatagtactcctcctttatcccgaagaaaattgtgatttgtgtgttggttttccttccaatcactttgtttttgtgcctttatcttaacaactttgttttatctgctctatcatttttctgtcacaattcatcaaatttctaacatttcattttttatttttcgtcattatgttgctttaattaggtagtttcattgtttcatcagaaaagagacagttcacgtcagaaaaatgatagattatttgtgcatattgatgataaattggtatcatcaaatattgggggatgtcttcctctatcaattaaaaaggagattttactatgaaaaagaaaacaaactgggcaaaaccaaaacgttatctgccgctctatctcatgctgctgcctggtgcagcctacctcattataaataattatctccctatggccggtctggtactcgcctttaagaaggtaaattataatgtaggtctgttccagagtccgtggacaggtttatcaaacttcaaatatctgttcaccaccaaagatgcttttatattcttccggaatacaattctttataatctggcatttatattcttcggaaatctgatgggaattataactgctgttgctttggatagtatccgtaaaaaatttttcaagcggttcagtcaggtaattattctgattccttacttattgtctaccgttatcatcagctacattgtgtatgccttcttaagtggcaataatggttttatgaatatgactgtccttccggcattgcaccttgataagatcagctggtataacgaagctaaatactggccggtcatcatcacaattgtgtatctgtggatgtccttcggttatagttccatcctctactattcaacattaatcggtattgacaaatcgtactacgaagcagctgttgtagatggtgcaggcatctgggatcagatcagatttattacgcttcctgctttaaaaacaacgatcatcacactcgtattaatggcagtaggacgtatctgctactctgactttggtttattctatcaggtacctatgaacagcggtctgctatactcaacaacccagactattgatacttatgtataccgtggactgctcgaactgaacgatatcggccgttctactgctgcaggcttccttcagtctgtcctcggatttatttgtatctttatagccaatataattgtttctaaaattgataaagacagtgcactgttctaataaccggaggtatcattatgatttataaaaataaagcttttcgtattacaatgaatgtcatcatggttttactcacattatgctgcattctcccatttattcttctgattgctagctctttcagttcagaagcagaccttaccaagtatggatactctttcattccaagaggttttacgcttgcagcctataaatatatctgggcaatcaaagaaaatattcttcgtgcttatggcatgagttttcttataaccggtataggtactgttataaaccttgttatgactttattatttgcctacccactttccagaaaagaccttcctgggcggaaatggatttcctttttcctgttctttacaatgcttttcaatggtggttttgttccgacttacctgatttattcaaatgtttttcatattacagacacactggcagcgatgatcgttccttaccttttaatgaatgcattctatgttatcatgatgcgtacctatattatgacaaacgttccaatggaagttatcgaggcatccatgattgatggtgcaaatgaattccagaatcttgcaagaatcattattccaatgtccaaaccgatcattggaaccattggtcttatgtctgctattgcatactggaacaactggaccaatggaatttatttcattcagtcaagacgtaatctctatggaattcagaattatctgaattccgttatttcaaacgttgctttcctgcagacacacagcacggggtcaggtattgttactgcggatcttcctagtatcagtatccgaatggcacttgctgtcattgctattatccctgttctggttgcatatcctttcttccagaaatcatttgttgcaggtattacagtcggttctgtaaagggctgataaagaaaaagaatgaggctgcctttgtaaagacagcctcattctttttctttattatttttcctgctttccatgaaaacgttctgtacttgaccgctgtatcaatttcaccggcaatgtcagtttctctggtgcgattttcccttcaatcttcttgatcagcatttccaccgcacattcacccatttcctggattggctgtgatatcgtactcaggtccatccattctgcaatttcaaagccatcaaatcctatcacagggattttacggtataaatcagtttcatgaacagacattccgctaaaaagctgtgccgcaatcatgtcactggtacagaaaataccatccacttccgggtttctttccatatagtcaaaaaaaacttttttgagagctttttttcccataagtgtattctcaaccagacatatttccggcactacaccggcttttgcacattcttcttcaaacccccgtatacggtctgtaccaggcagatactccggcactctggaaccaataatcaacggatgcttgcttccacatgtggtcagctctcttgcagccattctcccaccggcataatcatctgccatgattgatgtaatcccttctatctccctttctatactcactaccgggaattcataatttttgaaaacatcagcttcaccaaaacggctgcagacaagaattccatctaccttattcgcctgaaggatagaaaacatctcctgttctctttcctgatattctcctgacttgcaaagcattaacttatatccatgctcatgacagctttcttccactgcatctgtaagctcactaaaaaaagcataatttatatatggcagcactaatccaataatattactctttttctgctgaagtgctcttgccatggcattaggctgataatgcagttcctgcatcgctttatgaattttcttttttgttttttcactgacaacatccgggctgttcatcatccttgacactgttgctacagatactccggcatattctgccacatcaactatggttgccatatttatatccttttccttttctgcaattccgaaatattttctgccagaattttattctttcattataaagaaccggacagatatatgtccagttctttttattcttcattctttctttttttgcagagaatttacatttccagtgcttcataaacaagatcccggatcaccggatgtatctccgaataaactttcgggaatcccacaatatgctgtgcatagaaaatactgatatggttgaccggatcgatcataacataggctccggccgctccatcccatccaaattctcctaccggtgattttgattccgctgtatcatttaacactctgactcccagtccgtaccggtatcccttcttccctgtcatcacaaaatcatcctgcataatgcctgttgtatatccagtcataaataaccggatcattttttctccaagaatccttttaccggttactccgacgccaccattgcacaaagcatctgcgaaaaggctatatgcatctaccgtaccagccagtccggcaccaccgctctcgtagttctctgtaattttaaaaccatcactcatggatccatcatccggtctgatcttatccgatccaaactcacccatataaatggcacagattcttttttcgagttctccatcccagtgaaagtacatatcctttattccaagcggtccgaaaatatttttcttaagatacactgaaaatttcgttccggagacaacctctactacagctgcaaggacatcatgtccaagactgtaagaccatctggtctgtggttcatagatcaaaggcatctttgccatctctgcaacaacttctcttgtacctgcctgattattgcttttttctttgattgccatcagctctgctgcaccggtatcataagataatcctgctgtcattgtcatcagatcaataatacgtatctgattgtgtgcaagatgacatggttctcctgcctgcggccagtgtatcggaaatttaaattcaaatttatctgcaacaaacaagcatccgaactctggaagatagtttgtcaaattatcatacaatcccagttttccctgctccacaagctggagtactgctgtcattgtaaaaagttttgttgctgaaaacagtcggaacatatgactggctgtcagcggaactttcttcttataatccgcatgtccgattactttccgataaatcacttcatgttcttttgtcactttacagtcatttgccggaattccatatttttcttccaatgaatccagatattctgtcagtttttcaaagttcatattagcatttctccttatttttctgatgagagatcatccagtctaaaattccattctcgttgtgtaatgcaaggatccagctattatgattctctgcatcaagctcctgtgaggtaagtccatctgttgttccgattccatattttgcaagttcttcctgtgtatacaatgtaaattttacatctgttcttccttcctgccacagcttgttgcatgcattgagaataaacgcatgtctgctgtgctggtgatccatataggcagatgtgatccataccggaactttcggtaaatgaagaagatttgcatagctttctccattcatgctcggacagatcggtaccgccgccgcaaataagtccggtgccactgaaattgtctgaagcacaccgcctcctcccatactcatgcctataagataaacacggttttcatctacttttccgtctgaaatcatttttcttataatatctgttacttttgcaacataatcacggttccatccacgttcacctttcaaagaaaacggtgtgattcccatatctgcactgaatgggtttcctctttttttcatcacttcgaacatttcctgcattcccaggtttccggatggtgcctgtggtgccataatgtacatatccgaccatctctccgccagacgcagtgcaccgagtgttcccgttaactgaagttcattatcttcaccgcattctccacctccatgaagaaacaatactaacggcctcttgcccatacattccggctcatacatacgatagtgtacaccattttcttcatatgccacaaactgatccatatctttgatccagactttatctacatctgccctggtaaaagaaacttctgttcctgcaatggttcctgtcactttaaaatcatagcggtagacaaacggatccagtatcagttcaacctctgtaccttcttctgtctcacagatgctgatttctgtcacaccctttgcatttactttaccggtaaggtcattataatttttttctaaaatgaaatctgtcccgtttgtcatctttacttcttcgcaacaagtatctttcaataaaagcacaaaagaatctacaatctgtccataatctccaatatgcgtttttgcagttatttttcccagtttccacatttttgcttttccctcctgcatttattatgattattctacattagctcttcaaagttttccggtacagcttctcccttaaacagatctttgataagatcgaccatattggcagataaatccgtaaagtgatccgtaacatacaccatcccattacaggacgacagctgaaaattgcatatatattttgcaaaccattccactgaaataagcagttcttttcctctccacaatgcctcacaatacatgctgcgcactgtgttatcaatcacacagccaatacttcctcttgcaaactgaagtcttctgccatcttttaatttcaggatcacaactgctccgtcttcctctgactcatacccggctcctgttgcttctgcaagaaaagaaagtggtacacacaaataacttcctctgattttttcagcgccctggagcccatgatattttaatttgttccacataatggctttctctttcattgatattaccctgttggaaagccacgctttatcaaaaccgtctgcaactgcaaatgcaaatgtatcaccggttctcggcagaattgtttctgtctgtgtgatgcttccgtcttcttctcttctgattccagaaaacagataatcccagtaaaggaacgcttcatccagtgtctgtccatgatccctgttttttatatccagatatacaagatccgcttttctgcccttataaaatgcaaaattatcttctccgataatctttatctgtggaaccggatcgcattcgttgatgcgcatccaataaatacgattccatttgtttacataaaactcatcataactttttcctggtggaaggccatttttttcaggtctcgactgccagatagccatatgtcctgctttattttttatttttccgctttcatcataaagattgaatggttcgcatggacctccggagcctgccgcaccggcaagaatccgtccataatttctcgcaaactggcctgtcataatattccccattgacatgccttgcataaaaatacgccccttatcaatgttatatttttcttccatccttgcgatcagtgcctgtatcattttaatatcatgattgtcgtccatattctcaggtggaagtacaatcggaagatccggtgcatcctcctgtctgaatgtttcaaatacaccttcgacagtccacattctcttttcatgtgcatttgggaaaagacagataaatccttctctgtcagccacaagcgtccatgaggtataaatagcatgcccccatcctgtcatcaaaccaccatgaagtcctattacaagtggaaccggtcttgatggatcatagctttccggcacatattcataccattcgtcctccagtccatctgccactactccgtgaaattcctgcaagtgctctggatatacgattgaattgtttccattttcatttactacaatatctgttgtttttattctttccggtaaatattcccggtttgcatcatccggtgttcccggaaggattcttacctgtttgttcacttgattttcctcctgccttataatcagtccaatggtacaattccaggatcatcatttaacatatcacggatcaggtcagccatgaactgtccaagctctgcaaagtgatccgtcacataaacaacaccattgcagacagaaacagttttattcataataaatcttgcaaaccactcaatggaaacacacagttcaccttcgcggtataatgcttcacagtacattgatctcatatcattatttaagacacatccaatgcttccttccgcaaactgtgcagtttttccgttctcccatgtcaatgtcacatcacgtccgtggtcactgctttcgaatgctgctccaaatgcctccgcaaggaaagaaagtggcacacagatgtattcacctctgacttttatacctccatttaacccatgatattttaatttctgccacttgattgcatttgctttcatctcggtttttctgttacaaaagagtgcttttttacatccatccgcaactgcaatattaaatgcgtctccctttctaggaatacgggatcccatatccacaagtgttccatccgcttttctgcggtatccggagaacagataatcccatactaaaacagcttcatcaaagccatttccatggtctctgttttttatatctgtatagaccatatcggctttctctcctttatagaatgccatattgtcttctccgataatactgatctccggatctgtcacacatccgtttactttcatccagtaaagtctgctgtacttataagtaatagcttcactgtattcgcaccatggcggaagcccatttttttccggttttgtttcccagaccggaagtgcacctgccttattgataacattccagtctttatcataaaataatttcagattaacaatcgagccacccgcaccggatcctcctgcaagaatatttccataatatttttcaaactgtgttgtgaacatacttccatttgacataccctgcataaaaatacgctcttcatcaatattatattttgatttgatcttctcgatcaatgctaacacaaatgcaatatcatgattgtcttctctgtcaggctttgcatagttcatccgcagttcttccggtccattcacatttgcctcaatctcctcctcagttgcttccagtgtccatagtcttctgctgtgtgcattggggaatacaataatcacattgtctctgtctgcaaccattgtccaggaagtgtagattgcctgcccccagcctgtcatcagtcctccatgcatggaaacgatcaatggtgttttttttgaaggatcataaccttccggcacatactcataccagatatcctccactccatctgcaagtacttctctgtattcttttaatcgttcaggatatggctgtgaattattcccgttttcatttactacaatatcggaatttttgattttttctggaagatactctctgttatcatcatccggtgttcccggtctgactctcatttctctttccatctgttatctcctttcatctgttatctggtttctatatcatctcatcataattatcaggaacagctttatcatttaaaatatcacgtataaggtctgccatattcaacgacaattcgctgaaatgatccgtgatgtaaataactccgtcacattctgatacctgaagattatatgcatactttgcaaaccactcagcggaaacatacagttctccatcacgatgcagtgcttcacagtacatcgctgtcagttcctggtctgtaacacatccgatgcttcctcttgcgaattgcatttttcgtccatctttcaaagtaagaacagctgtcagtgtatctttactgtattcacattccccatcaaatgcttctgccaggaaagtaagtggaacacatgtataaattcccctcaccttttctccgccatttaaaccatgatattttaatttctcccatcggatcgcatttcctgtcatctttataacctgattattcttccatgccctggaacttccctgagaaagtgcaattgcaaaagtatctcccttccgctcttttatagatccgatattccggattgttccatcactttccctccgcagtccggagaagaagtaatcccagattaaagctgcatcatcgaaactttgtccgtgatccctgtttttaatatcaagatatacaaggtctgcttttctacccttataaaatgcaaaattgttttcaccccgtatacaaatttccggaagtgttccgcactcatttaatctcatccaatataatctgttgtatttatttactttcagtgcctcttctttttccggtgggatatcatttaactccggacgggactgccatacagcaagatgtccggctctgtttttaattttctcattctcgtcaaagagcagtgataaaaatgacgcacagccggaacctgctgcacctgcaagaacatttccaaaatttcgtgcaaacaaagacgtcatcatatttcccatagacattccctgcatgaaaatacgacctgcatcaatattgtatttttctttcatccgctcgatcagtccaagggcaagatgcacatcgtggttttcgtccacattatctggtgactgtctgattccatccggtgtctctgtgttggtgtccggtccaggagcattcgggtctgactcccattttccccattgaacctgccacactctgttttcactggcatttggaaataccaaaataaatccgtccctgtctgccgccattgtccaggaagtatagattgcctgtccccatcctgtcatcaaacctccatgcatagaaagaacaagcggtgtcttttttgaaggatcataactttccggaacatattcataccactcatcttctatattatcagcgatcaccccatggcattctttcaatctttccggatacggctgtgaattatttccgttttcatttactacaatatcggaaccttttattttttccggaagatactctctgttatcatcatccggtgttcccggtcttaaaatcatttttcccgtcattttttctcctttcactccatatcccgcttaaatgtatcgttaatattcagccagtccaaaaattttttcacatgacggttacaatattcccaattatgtgcgccatgatcgatcgtccgttcaaattcaactccgagtttttcgtagatatccataaattcaacattatccttataatgagtatcctcaactccggttgccatatatccgcgtgggaatttttttcctgctgctttctgttttttgatcatatacacaacatcatcttctgtgtcttttacatttttcctgtccccaaaagctgatgcaagcatataaaagctgtctgtattatcctccttctccggcaggatatccggtacatttttaatccctgagaacagtccgaatgccgcaaatttttccggatcacgcagcatccatttcaaagtaccgtaacctcccatagaaaatcccgcaataaaattttctttcggatcatccgataatgggaacaaatgtcttaccatatttggtgtctcgattgacagctgtgtaaaatatttaaaatcgccatgcttggtatccatatacccggaacagtaagtgccactgcacacaatcgccacacctgcctcagcagcatataattcaagtgctgtatagcgctgccagtctgtgtagtcaaatccgcctcccgactggagccataagaccgggtatttatatcccttcggtctgtctgccagagaatgtccccatgtattttccggaatgatcacattcactcccaccttcatccggagtgcctctgaaaaataatataatctgaaattcgccataaaatccccctaacgtccacacagccaggcaactgcttttttcattgttgtaatacatgaaaaatctgcttctgtctcatctgtttcttcatatacagccctgtcttttaaaatccgagtaagttcaactgcttctttctggtatgctgatccttttgctccagtaatataataccgaccggaactgtttttttctgcgagtgcaaaaacatcattatcactgccctttatatgatcaatatcgccaaatactgctttcagtgattcttcattatggcatacgaccgtttccccctgtttggctctctcacagattttatccatgtcataaataccatccatagcaatgcaagccgaaaacacttccggatgttttagtgccgctttcacagctccatatgcccccgttccaacaccgccaatccagttcaattccggtttatcagataatggcaggttgtttctgcagattcctggcagttcctttaccataaattcttcatattttggtccatactccatattggtacacagacagtgctgaacatctgctgcgataataaagattccgttttctgctgcacacttctctgcaggggtgcacagccagtccatggaactcccaccatcactgtgatataaccacaataccggatattttttatcgtagtcgttttctcccaatccaagcttgtccatctctgggaaaaacacctttgcactgaacgacccacataaaaccgtcgatagtgcattcatctctattattgccataatgtctcctccttttcttatatagactataacattgcatttcaaaaatgtcaaacgtttacatttttatttttatttatataagttgacttttttgtctaaaatagctaatatattctatatagtttctttattataatatatttattaccattttaatttatataaaacatcaatcgtttaacaaaaggtgatcttatgaaatatcaaaaaaaacattattccataaaagctgtgctgacccgcaatttgtcgatcctgattgccacttctcttatcagccttatttttttcggtattttttcctatcgtacaggaatacagcaaataaaagaaaacaatatttcttcccttaacgtctacgctacaacacttcagactgaaatgaaaaagctggaggatttcacaaaagatatctgctacagtgatacctcttaccatctgttaagtacgaattactataccagcagccagaagatactttatgaaggtactctacgcaaaatgcttcagagtgaggtttctccctatagtggacttcttgtattcagtgataccgctgccacatccatgtacgaatatggttcttattttccaaatacatacgccaaacactgctatgaattaaaagaggaactgaaaaaatactatcttgaggctcctccctcttcgctggaaaactggcagacatattcgaatgactatttttccgtaattatgtatacctgtcaatataatgggctgtatctttgttccctgattgacctgaacttttttgcactggaagaatacgcatccctggacaattcgcttcatatctgtttctttgaccaggaacagattttatcgaatctagaagaaatgaagcttcttggaatcagtcagaatgatctggcgaaatccactaaattatctttttcacagccacaggtaatcaatactctgtcattgaaaaattcagatgtatccatcgcgtgctgtatgtccgtcaattattttggtggttcttatttccagattgcgattttctgtcttgctgtcatgattgttatatttataattttatctatttttatgtatctttctttccgggatatactctcctacccggtaacaaggatcgcgtctgctgcagaatcaatcgggcagaacgatatttctagttttattgagtgtaatgaaagtaatattttggaatttgaggaaattaacagagcacttgcccacttaatttcccagaaagttgaactggaaaagctaaaccagctggaaaaatatgaaaaaaatcatgccatgctgcaatatttccaactccagacccgctcacatttttttattaattgtttaaaaagtctttataatatgcttgaactgcatgaatacgagaagatgcagcgcatgatactggctttttccaaccacctacgatatatttttcatgacaatttaaaagtggtcccattaaaatatgaattagaggaagtgaatgattattataatattatacttatggatcgttccaaacccattctgcttatgcagcagaatgacaattccctttctgattaccaggttccacctcttttgatccagacatttctggaaaattcagtgaaatataatgcacagtctgataagctgctatgtttttctatccatattgaaaaaacattttataatgataaaccttatgtattatttaagctttccgataacggagttggttatggcaaagatatgctggataaattaaattgcgaagaaagtgatctgtacgaagattatcatgtcgggattacgaacctgaaaaagcgaattgagcttatttatggaaccaattactatattactttttataatgaaccggcaggtggtgcctgcaccttaatctacctgccattggaggatactatatgacattactgcttgtagatgatcagataaatgtaataaatggacttatgaatggaattaactatcgggaacttgagattgatactgtacttccttccacaagtgtgcaggaagccaaaacactgatctgtgaaaatcagattgatattctcatgacagatatcgaaatgccgggagaaaacggattgcagcttctgcactgggtaagtgaaaactatcctgatattgtctgcattctgcttacttcccacgctgatttttcctatgcacaggaaagtatcaaacttggatgctttgattatgttgttcagccggctccttaccaggaaattgaagacgctcttttacgtgcaattgcaaaagtccatacagaagctgaaaaaaatcaatattacaaagatggtcttttttatacaaatcacaaacaggaactgactgaccggacgattctaaatcttttttcccagaatcctgcaaaccgccagcaggcactgcagctgttaaatgagatccattatccgctatctctacagtcctgcatccgcttaatctccattgatatttatcctctgactgataatacagctgactcttcccttgttgatctggtcatgcgtcagaagattactgacagcctgcggctctgcggttttggtaaaccgatttacaacttaatcacattaaataccagtaaacggtttgtggtcgtcctttttgcaaacggagatgcactttccgatctctctgtctctgcctatcatgcattttatcagcagttatctaaacagatcagtcctgaaatgtccatttatatcggaaactttatttccttttctgagatgcgttccgagattcacaggattgatacttttgtagcaaataacgtaaacaaaaaaccttccctgtacttcactgagcaggaaaaaaattttgcaacatccatggatgttgcggataatattgcacactggaatcgccttctgaactctgaacagtacgaaaagcttctggagagtattctgtcctaccttgattttattgcatctcttaatgtgacaaacttaaaaactctctgtgatctgcatcaacaactgacacagctttttttcatttatgcctatcagcacgagattgatgtcacatccctgtttacggaagaatattcctataatgaatatatggatgcctttaaagatacttctgccctccgcaaggctgtttcctttattattccagcaatccatgtatcttctggatctgattccgaaaaagacgctgtttctcttgcgaaaaaatatattacaaacaacgtctctttaaatctgtctgtaaaagatgttgcagactacgtacatttaagtccggaatatttcaccaaactattcaaaaaagaagttggacagaatatcaagagctatattttgcaggtaaaagtagaaatcgcaaaagatctgcttggaaatccaaatattccaatcagtatggttgctttagatctcggttacagcaacttttcacattttacccaggtattcaaaaaattggaagggatcacaccaaccgattaccgtaaaaatattctaggggacaactctttcccttcggattccgactcataaactcagcaaaaaacagacagcctgctatatattcagatcagcatcctgcctgtttttccacattctatgaatcctttatcccgaaattttcttaatccattttccgctctttaatctccagacgcaccagaaacattttattatttcatcaattttcaggaaaaaatatgtccagaacgccggccagtgcagcactacacccgcaagatagcccaaaggtacacttgcgacccacaagaacagaatatctgcaaccattagaaacctggtatctccacctccccgcagaacccctttagtcatcatactgtttacaccacgaaacagcataatgattccaatagaatacatcaattccttcgcaattactgcggtctcaggagtaatattatagcagctgattacagggtctgagatcagaataataataatcgtagataatgctccgagaataatacccattttcatgaaacgttctgcttcttcctttgcccgtgcaacatttccctcgcccaatgtatttccaaccacaacactgctcgactgtgctgccccctggataaacaccgtactaagctgctgtgtaaccaacgtaatggaatttgcagatacgaactggcttccgattcttcccattaccatggaaactgcactgttaccgaatccatataatgtatcactgatcaccaccggtatactgatctgtacatattctttcataagattctggcatttcataaaaatatcgtgaatcctgaatcctatttttttatcaaaaaaaataagatacatgcaaataaatacaaattcaaaaatcctggcgatcagagtcccaagtgccgcacctgtcactcctaattccggaactccgaatttcccgaaaataaagatataattacacccgatattcagaaaaaatgctcctattgaactgaataacggccattttgcatttccaacactccggtagacatttgagtatgccagagacagccccatgagaagacagcttactgaaagtaccttcagataactgacaccctgtgagatcactgccggttcagaaataaaaatcttcattataatttccgggaaacaccatgtaataaccgtaaacaaaattccaagtaccagacatatccgcgttgtgatcgcaattgtctgttttaaagctttttcatttttcattccccagaatctggatgtcataatcgatgcgccctgtccaagtcccatacagctgaactggtaaatattaataaactgatttgcaagtgccaccgcggacaatgcattttctcccagcgacccaaccataatattatctgccatattaaccccgatcgttatcatattctgcatcatgattgggacggcaagtctggctgttttgacataaaattgctgatttttcacaactttctctccctgttattttatctgtcaccgatatttccgcttccaagtccttctactgtatcatccgttggaagccattcgattgctttttcaatatatctgtcccaaaaatcccactcatgtgctcccggtccggtttcgtaagtaacatcaattccattttcttttaaaaatgctgcaaactcatcgctttttggaagaagtccatcttgcagaccacatgccatataaaatttaggaaaatctatattctcttcctttaatttccgcacaagatactttggatccatatcactatttatcaatttttcaagatctccgaagcatctctctccgaatgcttttgtttcataaaacatcacttcatcattttctttccgctttgccatatcttctgtaatcaatgcagatgacaaaccaataatgtatccaaatgtatcatgatatttcaatccattccggattgctccataacctcccatagaaagccctccaataaaagtgtcttcccttttatgtgataatggaaaaatctttcttgtaagttcaactaattcccgccctataaaatctccataattgtcacttccgtttggcatatcaacataaaaagaattttctccggatggcatgacaacaaccagatcattcatctctgcaaaacgctggattctggttccgttcacccagtccacatagcttcccaaaaccccatgcagcagataaagtgttttgtatggtttgttctctcttttcggaatacccggaaaatccggcttgtctgccggaatgatcacgtttacgggaaccgttctcataagtgctgttgatattaaattcatatgtataaatgccataattttttctcctctgataacactattttttcatcagcaactgtttaattcactatcataagtatacttatattatcttctatattctttcaaaaatatgtcttttatcattagttttctgccataaatgttctaatgcagtattgccgttgctcatacgtcttattttttctatcaaaacgcacaaacaaaaaacgccagaaccagcattttaaagggactcctttatctgcagaaaccagcgttttttctttgattccttatattattgtctttaccctgactttcttccctgaaaaagcaatgccaaaccttaagatatctgttattccgtcttctcgcatatcagcatcatatcttaatgtagtaatctgctgcaatgcttcctctgccagaaggtcaaggttctcttcttccagattcttttcccattttaattcaaaaagaatacccggatatcgtttctctctgggaatcatgcatatatcatatcttccatcacctgattctctgttcgatttaatcttatactgattgtccatcaaagctatcaatccaagcattaggccatgataaaatccttctgctccaccatcaaaaaaacttatggatttgtccagatattccgccactgcactttgtaatttcttatggtcatttgcgtaaaggctttctgcgactttattcgcagtagttcttgtgataacacctgtctgcaaaaaatgtgacaggatttcactcttataaactgatgcgatctctttatttgggatagttacctcacataggtaggaaccgtctgcctgcaaatctcttttctgtgttttcagatatcctgcaaccagcaacaggctatagatgtttgcaggatcttctgcaagcgatctgtatacaacattctggtctattcttgcaacgacactcccaccttgtaataaggtatacagtttttccacaacatcatctgttgcagcattcataatttcttcgaatatctcattttttcctgtgtttacccagtatgcctgtgggatacatccttttgagatataattgatcactgaccatggattataaatttcttcattcccgaataaatatccatcgtaccagtctctaagctcattttctttttctgacataccgtaatacacaagcagtttctctatttctttctctgtaaacccgaaaaagctgtcgtattcttcatccatcacagtatttacggaaaggttattcagcccactgaaaatactctcctgtgcaattcgcagaattcctgtcagaaatccataagacaagttcttgttatctttaaatgctcccgagaaaaaatttctcataaatccgataatttcatcgtagaaatcttttgaatatccctcctgaataggtgtatcatattcatcgataatgataatcggagccttgccataatggactgtaagcattttagataaccgctcaagtgcagacgtaagctctacctcatttgccagagctcctaagatcttctcgaaatattctctttcatactgagagatcctgtcactgcttagtaattcctgatgcctcccatattcttcctgaagtaatccgcggattttgtctatggttgcttcccatgtatcgaatttaacatctttgaaggttaagaaaataaccggatattttccctgatgtctgcgatatttttcgccacatttccagatcgctttatctgtaaaatacttactggtatcgtcctctgatatttcaaaaaatactctgagcatgtccatattcagagttttaccaaatcttcttggtctggtaaataatgagactaatggttttctgtccaaaaactctttgatcagcagcgtcttatcaacatagtaatactccgattgtgcacgtacataatccgaaattcctactggtaatgtttttttctctttttctgtcttttttttgctatatttcccggttgatattcttccatccagaggtttttctgcatcgtcaggaattaaccaggttcttttttcttttactgctccctgaactcttccgtttttacacattgcatttactgtacgaggcgtaacattccactctaacgccttttcactgcatgttttcatcaaagccacctccgtttatttgtagtttcccaattattttatacgtaaattataccattttgaacgcaaaatatcaattttatttgattttttgcgttcaaaattaatattttacgtttataatttaaccttataaccaatttcattttataaatcgtctaatgtagaaaagccagcaaaaaagatctactcaatctttttgctgactttcattctaatcccgacgctaaaaaatattactttctgtacctgatattctatttactcaaatttatagatatctccactcggcacataatgcaccggcaccgcattcccgatcacttccgggatccagtccgcggcatacttcattccaagctcctccagattaaaatgtcctacattgaatgctgctttcacttttccaagctgtactgcatctctgatataagacatcacagtccagtcgatcacttctccaggaataatcgcatccacgtcttcctcttccaggatacggatcacttctgtcgcatattccgggcagaagccatctccggttgttggctgatgttcaaatatattcggcagtaaatgtcccaccatcgcaactttcttaagcttatcttttggatttccaatatagcggattccgtttaaacacatcttctcttttaataatgcattcatcttttccactgtcatatccggaaactcaaagtacattgtcattccttctgtatctgcatttacgcgatattgttcccatccaagatatttgatcactccagtgaaaataccatctggattgtgtgcatgtgtatggtcatgatctctccagaccgcaattccatactgatctaaaagtgcttttttctcctcatagatcttgttctcaaatcccgctctccagtccggataatccggcgtggaatagtaggatggttcatgtacatataaaagattgcagcctaactctgctgtctttctgattacttctactgttggtacaagtgcagacacaatgcctgtacattcgtcgtccggatttcctgatttgaaaccgtcgcatccgtcataggatgcatcgaattttggatggtactctaaaattttgtctgtaatttctctgattgtcatatttttttcctcctatacaatataagtaaacggttctcccgcatccacaaaggtaaccggaagatcttctgtgatactcttaagccatgccggaagatgtttcatgccccactcttcactccgttcatgcccgagcactaacataccttttttcatgccaagctgtgctgcatcccttacataagcagaaagtgtccactctgtgatatctccgcagatcgcaacatcaatattttctgcatgcatatgacgcatcggaagattctcctgtccaagtccaagacttccgcctccgaccaacgcactgactcgttttaccggcatctttggatcaccaacaagctgtaccaccttcatatccagctctttctggaaaaaatgtgccagctcctccagggttgttttcggaagctcataaactgctccaaaccatccaaggtcaccgtcacattttacacggtattttccccaatctaattcttcatcaaaaccacggtaaataccgtcatctgcatccatatgcatatggtcgtgaaaacgccagattgcgatcttatgctcctcaatcagctttttcttttccagataaaccggatcatcagaaagccattctgtatcatctgcccctgaaaaccaggttggctcatgtgtgataataaaatttgcttccaggtcgattgcctgtctgatcacatcaacggttgccataaaagtcgaaacaactccctttacttccatgtcccagcttcccgtcatcagatgatcgcatgtcttttcttccggaagcggtgtcacgccggtcttctcgataatcttatttactaaatctcttactgtcatattcttttctcctaaaaaaacagcccccgcagaagaaatatgcacacgaacacgaactactatttcttctgtgcagactgtctacacttctctatgaaattaaccctttacggctccgacaacaacaccctttaccagatatttctgtacaaaaggatagatcagcataatcggaagaattccgatcactgccatggccattcggatagatgttcccggcaagtcgatcgcacctgttccgatcagggctgcattcgagctggaacgcattgcctgaatattattcatgatcttcattaacaactgctggatactatacagcttttcattgctgatataatacagaccgtttgtccagtcattccagtagcagatacctgtaaacaaactgatcgttgctacggttggaaccgctaacggaagcatgactttaaagaagattttcagttcagatgcaccatctaactgtgctgcctcgatcaaagaatccggcacactgttctgataatagttttttacaagaataacattaaatgcacttaccagatagttcggaatgatcaatgcccagatcgtatttttgatatggaaaaattttgtccacataatgtaagacggtacaataccaccattaaataacattgtaaaaaatacgaaaaatgccagtgcgttacgatatttgaaagattttctcgacattggatatgcgagcatggttgtgataattacgcttaacgcggtaccaacaaaggttaccaggaaagaaactccataagatcttaagatcataatactctgctttaccatgtaataataagcatctaagctccactgttccggccagtaagtatatccgtttcggatcagggatgactccgccgaaaatgatgcaatgacaatcaacaggattggcagcattgcaatgatgactaatatggtaaggatgatcgttgccacccggttaaagcttttactttcggtcatatctctgccccccccttagaataatgcgttttcagaatctgctttacgtacgatgccatttgcgatcaatacaagagcaaatcccactaatgactgatagagtccggctgctgctgacataccaacatcatttaattccatcaatccacggtatacgtaggtatcaatggtctgcgttacattaaataatgctcctgagttctgtggtacctgatagaacagaccaaagtcagagtagaaaattcttccaatcgacattaaggtcaatgtgataaccgttggttttaacattggcagcgtaattctgaaaatctgctgcattttggttgcaccatcgatcgctgcggcttcataaatagatttatcaatacctgaaatacttgccatataaacaattgactgatatcccatgttcttccagagatttacgatgataataattgccggccatgctccggtgtaggaataccatgataccgggtctaatccaagtcctgcaaggattgttttattgataaatccggtatccgcatttaaaaatgcataggctataaatccaataacgacccaggataacaggttcggcaaaagcaatgctgcctggaaaaatttaacacgtgttttttttccaagttcacacatcatcacagcaattgcaattgcaacgattgttccaataataatgaaagccacattatataaaattgtgtttctggtcataatccaggcatctttggtcttgaacaaaaactggaaattctgaagaccgcaccaatcgcttccgaatacaccttttctaagactataattcttaaatgccaggaaaataccaaacattggtatataattattgatcagtaagtagacgattcccggcagtgcaatcataaagagcggcagatttttaaattttctttttttactttttgcaattgccttttccattctattctccatttctgtagaactgccgcattttcatgcggcagccttttgatatctgtgaaaccgtgtcactctgttttatttcttctgtgcaacccaagcatctaactgctcctgttttgcatttaaaatatcctggtatccggcatcatccaatgcttttacaaatttttcaatttctgtatccggatctaagcttccgcagtttaatcctggcatatactgtttgataacattgtttactgcggtgtactgtgtcttcacactgctggaatcaaaggtgaagcccattgcaggagatgtctttgcaatcttgttctgctctaattcccagtcaagagatgccggatcagatccttctaggcagtacattaagaaataatttcctaatgttccacagcttaactgtgctgtatatggtacggttgtagaatcttctccttctggataagaaacagttccatcatcgtttttcacatagtctcttccctcaataccatagatcagtaagttgattacatccgcatctgtataagtaaggtttaagaacttcatagcagcttccggaacatctgttgtggaagagatcatccagcttaccatattaacatcaccagtggaaagatatgcatcgccgatcatttttgccccgatcggatatccgccgcactgagcctctaaggatgctgctgtgtcagcttccggatagctatatgctgcgatgtagcagaagtagttaccggaactcattgtctctgctgctgcacttgtcgttgttgctgcatcctgcattacaagaccatcattgtaccagcttcttactaactcacatctctctttatagatatctgtagaatataaatctgttaccgtaaggtcatcacccattaacacacctgttggagaatacatagaatctgtcaggaaatcaacatctccccaagtaacatctaaaccgatacgacctggttctactggtgcaagcggaatcatatccggataagcttccttcacctgttttaaaatatcagtaacatcttcaatggaattaacagaactcatatccagtccaagctcatctgcgatatcctgtctgtagataaccattggtgttaatgcgattggttttaaagtcggtgtaccgtaaattgttccgtcggctgtgcaggctgcaagccagtcctctccgatcgcatctacaattccctgtccatactgatctaataaatcatttaactcatatgtcatatcagtagatacataattattaaaatcaccaagggattcataaatatcgattttttctccgccctgtaaagcaagacttactttgctcggataatctgcaaatgcgatcggttctaacgtaacctccacaccgatcttctctcttgtgatcttattgatttcctcttctacaacatctaagtcttcctctgtcgggatattattaaatgtactgtatgcataagtaacctgctcataatctccgtctgcttttgtgcttccagtctcagttcctgctgcagatccgttagaatctgaacttcctccacatgcagtaagacctactgtcattgcagctattaataaagctgccagaactcttttgtttttcatctgaaaaaccctcctctttttttgatagtatcaatttatcagatttatctcgttctttctttcaaaaaaaagatacaaactttcaaaaaaaagagaaccaaaactgattctctattttttacgatattgatttggcgacacacctgtatactttttaaacatggtagaaaaataggtgaaattatcaaatcctactgtttctgccacatcgcttactctctccccacgttctaacattctttttgcctcatcaatcctgtattcagtgatggtatctttgattgttttcccggtcatttttttataagttttcgataaatattccggtgccagataaaattgttccgcaatctctgttcgtcctatattttccctataatgctctcttatatactggtcaatcttctcactcaagctataattcttctgcacactttcctcatactggaaagtacattcaatgagataattcgtccaccttatcatatccagaacggattgtgtagctttctgtcccaactgatttacattatcatcatcaaataatcctgatacctgtatttcttttttcccaaaataagtgtaaaccgcctgaagaatttcttccttccctctggtcagaacctgattgttcagcgtcttatcataaattctttcctgtaacactgcctttagataacttaatatttcaagctttttcttctctgataaaagttgttctattttttcaacttcaaaaacagtctttacattttcctgaatttttgcagcatcatcctcctcaaagaaaccgccataatatgcaacatttttttctatcagctcctgctcataatgaaatgtttcataaatttcttccattttgcatggtcttccaatacagattgtgatttctgatgaaaagatttttttaaactctgtatgcagcaatttacagcattgtcttagctcctcagaagttttgctaaaacaaactgttacgaccagataataatgatcatagtccatagatactacagaactattatccgggcttccgcaaaaaatctcagaatggatgttttcaactacaaacaacatcagatcaggactcatctttgcccgatccctttttatctctgtaattttagagacaataatacaatattcctgattttcattaatctgtagctttcgtttttgaatttcagacaaaattatctctttctttcctgcgatatgtcctgacagaacctcactccagaaagaaacctgaatatgtctctgattctcctttaaccattttccatactcactattttctttcagcttttggttttcccgccgttttaaaataattttctttaaagctgcttccataacattcacgtcaaatggttttagcaaatattcacatgcctgataccggattgcattagatgcatagtcaaaactctcatggcaggtcaaaagaagaaaatctcccggaaggttctccttccgaaaccactctaacagatcaattccggaaccctgtggcatctctatatcactgatcacaacgtcaatattctttgattttaatatctcctttgcctgttgtatgttatatgcagcaaaggtatcagtcacccctaattctttccattttactgaattctgtatcacgtctactgttgccatatcatcatctacaattaaaacctgcattgtttaaacctcatttgtaatcccattaatccatttttatctgtttctgttccttcatttcctgtactgcatgttccggtattaggaatgtatttttacacccatgtggctcaatattactgattgtaaataatccatctctctcatacataagttccatcatccgctttacgctctttaatcccacacgctcacctgtctgcgtaattgtattttctttgttttcaatagcttctaaaacttcatctggatatccttctccatcatcctcaatttcgatatagagcatctgctcaccacctataattcttttctccgctttgataagaattgtcagcatctgatttatatttacagcatacttatattcgttttcaataatcgtatgaatgatcatctgtggaattctccactctttcacttccggatcaatgtctatataataaaacacacatccaggatatttcaactcctgcatttcaaaataattttccacatgcgcgacttcttcctgcaaagaaactgtatgcaatcctgcccggaacatataacgtatattttttgacaaagcactgatataattctcaatctccttattttttccctgctggcttaaactggaaatcgtagtcattgcattcagaaagaaatgtggtcgtatctgaagcttcatgcatttaagttctgtttcctgtaaatcaatctgtttttcgtagctttggatttttaacttcataatctcatccattaaacgattaaatgtgtctttcagaacgataaattctttgttatcaaattcttttgtgatacggtattcacgatttcccgtctgcatctgctccatacttctctgtatatgtcccatcggtgcaatcatttctttgcgtagaaaattaataaaaaatacagagaatccagccagaatcaatatgacactcagaaccaggatcatattccaccggatctgactgaaaatttcagacatgcttacatatgctgatacctccatttgtccgtctgcgagcaaataatctgtctcgtacacagtaccatttttccagtttttctctaatttttttcctatctcatatgtaatttcctgtttgccgcaactaccccatacgatttctttatcatcctttaacaagattgctattttttgcagtgacttttttgttgcattgtccataaaatgatccaccgaaataaaaatcccggctgatcttccctgccacacatacatcttagacacataatcccgtgaacctatctgcacaatcttccactctgcttttgcactgccctccccagctctctcaatggcatatttgcgcaaactctcacgttcctgataagctatctcactattctcataatctagacaactaccgtatgtactgtcaccaatcacaaccgcatccacatactgatcataggtaatctgctcctgtataaaattctttatctctatggaagcataatatcgttctgtttctttttcgctctgaagcatatcataatcattattcttgtaaatcagacgctccaataacatatccgcattttccagtttattctccagttccttgccatataattgaagcaaatttttactgcttgtctgcatattttctaaaactgtattataagaaactacaatatatgaaataactacaattgcaagcaatacactctgaataccaagcatgcatattgtctggcttaccaatgattttttcttcataatctctatatttatcctcacaaaccgctttttaacaactttcccgccactatcataccttgttttatcttatctgaaaagatttttttctgtgaacaaactccccaaccctgccgatatataaattataaatatgtacaggcgcatttattttcaaacaggtcattatatcaaactgtgcctggtacatcatgtcgtcagttttatttcacggaggaaataaagatgaacttaaccgttaacaattatttgtccggaacgatgaatggattctccaatgctactgttaacaccaaaaacaccggagcttgcaccgtcagttccttttgcacagggaagtcgcaaacaaaaaaaagtttaaactacaatgcaaagcaattatcttctcagattctgcgcgccacaaaatcgcggactgcttctgcggcgctttacaaagccaaaagcacggtcaataatctacaacgctgtcttaaaactggagaatatgatgacagcgaagttgagattgccctcgcccacgcaaaaagaatggtcaaatgcgcccagtccaaggtatcgaatctgaaacaggaagaaagtttgcagcggaaatacgaacgtgaaaaatcagcaaaagaattacagcagaaatcagaagtaaaacgtcgcgttcatcagaaagaaaacgacctgaaacaaaaaatggctgccgaggagattcagcaggtgcagaaagagaaatccagacatcaggagattatccgaaaacgccatatgcaccgcaacgaagaacgtggcaagatcaacgaagccgacatgaaatatctggaaaataccatggattataaacatggcgacagttccactgcaaacggcgctgtcgctgttgacctttcctacgttggtctgcagatgagtgaactgcagcaaatggaagcccagatgaatgctgaactaaacgcttccgcagatatgagcaccacagatgccgctgcctgtgacagcaccgcttctgccgcacccactccttctgccggaatcgtcaattctggaagtgtggtttaacgctgatttaaccactttcccctccatgtatataagatcattaaaaccgtaccaagcgcccacgaaaccggatagatcataaaaattccgtcaatcgtcgtaaagaatggcagaataaactgaatccacacgatacggaacagacataaagataccagcagcacgaccattggcggaaccgtctttccggttccccggaccactctggcaagtccatgcagaatactgagcaaaaagtagaacggacagaaataccgcattgctgcttttccaacttccacaaccgcgtcatccgcagtaaacattctcatcagcggatctgcaaatgtcaacagcaggaatccggttatgatcgtatagataaatcccattgcaaccgtaacccacagtgcctttttcacacgttctgtttttcctgctccatagttctgtccgacaaaagtagtagctgccatattgtaaatgacattaaaaagcacaccgcaaaaatacacttttaagtaagtgacagaatccccaaatacttcttccggtgtgttcatccagcgcaaaagcggtgccgataaaatcatgccgcccaccgtaagaatcaatcccaatatcactgccaacaaaatttccaacaataatcgaatccaccgtactgtataactgctgcagcagatttcccagtatcagcgggattgagaaaaataaaatattttttgtaatgcttccctctgtcattaatgttgtcttgttattcattatgtaaacttccttcggtcttctgtcattcaaatattgatccatttcgcttacttgaagcggagatttgaattgctgtgtttcaaaacattctaattatactctttcaagggaaatagtaaagtacctgcatctggctccgtaatctctccgttagaaagcctgataaccctgtcacagaaattgcttacgagtgccacatcatgagaaataaaaagcagtgccatatgttcctctttctgcacctgctttaaaagctccacaatttctttctgcaccgacacatccagcgcacttgtcgtctcatcgcagatcaaaagtttcggatgccttagcagtgctcttgcgatgcagactctctgacactcgccgccgcttagttgatctggatatttaaaactgtattcccgcggaagatgtacacgctccaatattttttcacaccgttctttccgctctgtcttcggtaatttttcataataacgcagggcttcctccagattttgcccgatcgtcatctttggattcaaagatgttttcgggttctgaaaaatcatctgcatatcttttctcgcgtcttttggaactttctttccgacaatcagttttccttcaaaatatgcacttccctctgttgcaggcagcataccggtcaggattctggctatcgtactttttccgctgccgctctcaccgatcagccccaggcactctcccggcataatctcaaagctgacattctgcaccgcatagctgtcttttacatttccatgaaattgttttttcaaatgctctgcccgaagcagcgctccctctcctttgtttgttccggcttcctgcatcttcgggattgcatcgatcagcttctttgtgtaagcctccttcgggtgatgcagtatttcttccggcgaaccggcttcaatgattctgccctgatacataacgccaatctcgtctgcaagtctgcaggcaacatccatattgtgcgtgacgagcagtatggaaagccctgtttcttcccgcagggcaagcagcgtctcaatcaccatatcctgtgctgccacatccaacgcacttgtcggctcgtctgctaaaagcagattgggatgattcatgattgcaagcgcaatggcaacgcgctggcacataccgccgcttaattcaaacggataggatttcaggatacgtttcgggttctcaaaacgaagctttccaagaagtgcttctgcctctgtcaaaatttctttcttccttctgtccgaactgaggactgacattttttgctgtcctgattctgtttttacctttccacattccagaaattgtttttcaattttcgataatgggcttagcgactgctccggattctggaaagtatatccaatcctgcttccatggatactgccccattctttttctgacagatgcgcgagattctgctcttttaatttaatttccccggaaacaattttgccctcgttcttcagcagtccgcctattgttctaagcaatgtcgtcttaccggaaccgctttccccgacgatcacatatatttttccgtcagaaagggaaaagctgacatcatccactgccagcttttccccatatgttactttcagatgatctacgatcagattctctcccatattacacacttccgtttttctgttttgtgtttttctattttgtattctgctgattttatcttcttaaggttctgatttgtccgtatttgacgatcttttttcagtccgaagccatgtgccttagtcaacagccagtgtattcgtcacaagataatactccgtcgggttgatctgcacaccttttactttgtttgaataaacaaagattagctgctggtcagccacaaacgcaaaagcattatcatctaatacctgctgggataattctttcgtaagggaatccactttgtccgtatcggctgtcaccccgatctctgctgcaagtgcatccactttgtcgttggaatatccaccataattgttgcttgctccggttgtgaacagcatgtttatgaaataggaaggcgttccgatcggagccattgcgtaatttaaaattgcaatgtcataatcgcctgctgcgagggaatcatccagcacatccattgtctcaatcgaaaggtcaattccgatctgtgaaagctctgcctgcagcatatccgcaagctggatacagttattattgtagctataggtaagaatcttaaaggacagattcacaccatttttgtcaagaatcccgtcgccgtctgtgtcctcgtaaccagcttcttttaaaagttcttttgctttttccggattgtaggagtccactgtgagatttaatccgtctgttccgccaaacgtcagattttccggataaattccataacaaggtgtggcaaatccctgatagacaacctcagcaaatccttctctgtcaatacagaaattaattgcctgacgcactgcaatatcctcaagcccttctgttttcaggttaaaattcaaaaagttcgctcttgttgttgtgactgtatccgttgtatataaggatgtgtctgtgaacttggctgctccgtttgcagtctcctgcgcgatcagatcaatctcgccgtttgcaaatgccatatcgagcgcatcctggtcatcaataatttttaattctatggtatccacttccggtgcaccgccccagtagttctcatttgcacgcattttcacatcggtcattgcagtaaatgaagttgcaatataaggtcctgtgcaggaaacacccagttctgcatccggctcctctgtcgcgtcatagataccaagcagcggatcacacagatcatttaaaagtgtaggattcggttccggtgtcacaattgtaaactgcatctcgtctgcttccatggatgcgatctttaaagtggaatctgctctttcattcatttcgtaagtacgctcaaagcatgccttcacagcttcggcatccactgtttttccattggaaaaagtcactccgtcacggatcgtaaacacccaggtattttcgtccggtgtctccacgttttccgcgatccaaggctgtggaacaatattttcatccagacggtataaattttcactgattccataaatcgacatgatccagccgtcccagttatacgccacatccagactctccgcaccgaaaaatccggttgttgcacccaaaataagatctgcacagtcacctgcaacattctgtgcagtctgcccttctgcctctgttcctgtcacgcctgtctggcttccagtattcgtatcgccacagcccattgcaagggttgcaaacacgcatattgtcattattacgcttactattttctttttcatttaaatattctcctatgcttaaattacctatattttgttaattcttcacaatccttacaacctaaatagaagttttacatttatctacctatgtcttttttattcataaaatcactcagtctgtctccaaacaactgaaacccggtcaccactacaaacagtgcgattccgttaaaaacaatgatccacggtgccttctgcagataatctcttgcttcgctcataacagcaccccactccgcggtaggtcttgctgcgccgagtcccagaaacgaaagtcctgccatactcaaaatgacacttcctatatccatggcggccgtgaccaccatgtttcccataatattcggcaaaatatacgcagatatcatccggtgcagtggtacaccattcatttttgccgcatacatataattttcttttttcatggataccacgaggcttcttgccagtctcgcatatgtcgtccagtacaccgcgcttaaggcgatcacgccattccacagaccaacacctaagacccctgctatcgcaatggaaagcacaaacgccggaaatgcctgaaacacaagcgtgattttcatcaaaacctcatccaaaatcccgccggaaaatcctgccagaatcccgatcagcgttccaaccagaaagacaatcccaacgatcataaacgctgtatatatagacgttctgcttcctgcaataatgcggcagaacacacaccgcccaagattgtccgtgccaaataaatattccctgcatggcgccagaaacgcacttttcatattgaccgcatagggatcatgccggatcagatacggtccgatcagcgggataataagcagcactgcaagaaaccatatgcttgccctaaattttacgtccagttttttcatcgtaccttcttttcccttctgacccttggatctaatagctggcacaaaagttccactgctgtgttgatcagcagatatatcagtgccatccacacgacatacgcctgaatgaccggataatctctcgcgccaattgacgttactgcaagtcttcctacgcccggccacgaaaaaattgtttccacaatggcagagccgccaagcagcgtgccaaaagacattccaagcagtgtaatgatcggaagcatacagtttttcagcacatggcagaaaagaatcctgtttttcgcaatgcctctggattttaaaccgatcacatattctttttccagctctccaagcacgattccgcgtatctgccggatataccacgccgagagtgtcagtgcaagcacaagtgaaggcatgatgattcctttcacactgaccgaaccgatcaccggcaaaagttttagtttcatggataatccgtacatcaacatgagtgctaagaaaaaagaggggatagatgccagcagatacgtggcaaaacgcactgcattatcaaaccacctgtcctgatattttgcacataagacgccaatcggaaaagagagtaacatcgtcaatgcaagtgctgttaccgtcaaaagaagtgtcgccggaatcgttttataaagttcctcagctaccggttttcctgtcttgtaagaatcccccagatttccatgaaaaaaggagttaaaccaccttccatactgcaccagaaacggatcatttaagccaagttcctctctttttaattccagtgcctcctccgaaacacgcataccggatttttttaatgccactgttgccggatcccccggtgaatgataaaccagcaaaaaggagagaaacgtaattccaatgatcagaatcattgcttttcctatgacaagtaacaatttttttatcatgtgttctccctattttaccgcgcggatcataaaaagcggtgtcgatgcaaaattgattttctctacatcatcccagacctttttccatacctcacgatccgcctgtacttcttcgaatccggcttcccggatcatccgcatgtcttctgccggacgttcacaactgcttagttccagctttctggcaatctcctccattttatacgcttcatcatattcattgaaatcaaaaacctcagcgtccttgacatttttccggtcttcttcgtatgcatcctgcaagctgtcatcaaagagatagttgtaccaccctgcatcaaaatttaaaaggataccaccctttttcagcacacggtaccattcctcgtatgccctctttggttcttccagattccatgtcagatttctcgtcacgatcacatccatagacgcatcctgcattttctcaaggttctgtacatcgccccgcatccattcgatcttagaaacatgctctccggcattttgcatggcatggtttaacatttcctgcgtgtagtccactgctgtcaccgcatagcctcttttcgcaagtccgattgcaaaaaatcccggaccggttcccatatctgcaatttttatatttttttcttccggaatctgagacaatatgacattcatccagttgatctcgttgatatgatctaattccccacagacaacctccgaatagctctctgcccggcggctccagtatgattccacttcgtttaacatcttttgtatcctgctttatcgttcattgttctatttccactttttttgcatgtgcaaaagaaagcggatttatcagtcttgtactaatctaacatggaacgatgctggatgtaagcctgtgggggggatatttttgcagtctttttatactcagaaaaaaccactggtttaagtaatgccaaaaccggtggtttttgaaaaggcttgcattgttcatctgtaagttcccccgcgataaatgaattaataatctgaaacatacgatattgcctgtttataactttcccctgtataaaatccctgcccaaagtcattgttttctctgccatgatgaacatctatttctccattaatttcattttttgctccatgaaacaataacttttcttttgtgcccagatcttccttccaaagcatttcttttaatttatttatctttatttttctcttatatgcataggaatatgcactttccaaaagcttattcgacggttccgtttctcctaattcgtttctcgaaattgttacctgctgcacgcctatctgctctgccaactcactttgcgaaagatctaatatttcccgaatagctttcaaatcttctgaaaaattataattcatatgaatcacccatcaagcttatttatatcatattacttaaataagtttgaaatgctatttgtatcacaatgatcgtcctaaactcatcactggcagagatatttttcgcaaacgtttgttagaaatatacgcacaaagccagcgcagactataacaataatctgcaccagctcttttattttctactattcttctttttctttcaaattttttctataagctcggattgtcattacttcccaaagtataagtaatattataattactacatctgctgtaacaataccctttacccagcctggtgtcttaaagttacgatcatccattgcattagaagctccaccaacttttacagaaatttcaaatggtttcaggtaaatctctctcatcgcctgctcatttgtccatgtgcaaagtgcatttttacggaagccttctgaatcatttaaagcaaaatgcttaatatagcaatggattccgtattcttttgcacctgcaacttctgatgctcccatatatccagaaaacacaccatcttctgaataatattcaaagtttcgaccagagaaaggtgttctgtgaatattcattgctggtccataccatccacaaacattcatatcctgtcactgctgtcccatagattcgcctcgctctttaattcaaactgaaagaagtttatacttccttctccttcatacttaaaataaagtgctgcatttccatgtatttctgacaactctgtgttaaaatactgccatttttgcgaagaaacactgattggaatatgaacgctttctttgaaatcagcagtgttcgacacaagcatttctccattcccgtttccatttaaacaaatgccaatctccgtctgatctgtaatctcaaaatacttaaatccagccacagccccgtctctcatattcgcaatatactgtctggctgttgcatcgccatccttcttatcctgcgtaatgtaaggatgttcttttagcagttttcctggatttccaacgtcatatcttccggctccgtcttttgaccacagattgcaggcgatccttgcttcatacacgccctctcccttcaatggtccgtcattcaagccacagcttgtcatctctgcctgaaggaaatctccattttcatcacagactaatttttctgcacaggtctgtctggaataggaattccggtttgtctgcctgtgataaaaaatatagtactgatcttttaaccgaagcatacctccatgattgtttccaatgtaattctttgcatctttttccgtcatgccttttgccgggaaaatatcagcgttactgatcagtgttcccttgtatacaaagccttctgtcggtgaatcactcactgcgtagcaaagttcatgattgtgcctggaagaatagacaaaataatattttccatcatatttccgaatggaactggcctcaaaaaattcatgatccgcaaaagctccctctccttttttcggaaataacagcttctccggtgtcttgatcgtcaccatatctttttccagttccagcacatatccaccttcatttttcagcttatgaaacccggttgcgactgccggaaccggtgtgtagaatccggaatacagatatacgcttccgtcatcatccactaacactccgggatcaaacggaaacgaatctcccttttttcttccccagacggtgccgtccttgtagtgcacatgtccgtaaaattcatatggtcctgccggtgcgacgctcactgcaacgcccataattcccataaaatcaaatgcatagtaaagataatatcttccgtcacatcccactgcgacatccggtgcaaacaataaccgaagtcccaatttatttttcgggtcctgattcttccgatagatcacaccttcataccgccagtctgacaagtcatccaccggtgcagaatagcagacatagtcatttgcacaaaatattggaaaattgaatctgtcatgagatccgtacacatatactctgtctccgaacacatacggctcgccgtccggtatatattcctgttgtggcagatatggattgaacgcctgttttttcactttttgctctccttgtcttttaaatcgaatatagcatatcatattcttgtttttggaatcatctttttcataaaatgcagattttatgacatatttgtatctttataggaatattgtaatttcctgtagagaaaaaaatcttcgcaatattcaagttttgaatactgcgaagattttggggtataaaaactatatattattatgctatccactcttttacaacattgatatcttcttctactgcctgcgcaatctgttctatcggcattcccatttttataagattctttgccttttttcgctttccctcattctctccttcatttcgaccacgttcttctcttgcatctaattttgcattaattatctcatctaactcttcacgcatcgctgctccgctaaaatctgcggaaagtctcatcatctgcaaaataacccgtcaatgtgctgccgtttgtcatataaaaatcaagctggctgatgctgtcccagatcactgcgccttccatatcctgatcatccgctgtaaatgtacagtcagaaccattggcaccctctgcttccacgttcagatcccatgcatataacgttccgtctgtcgtgagcactgccgctcctactccataaaagctggaattatcccctccggtactgtcagaagatatgcgggtaacggttatatttttcaagctagcagttgcgccgtttgaaacgaggattgcattttcatccgttccggtggacgaatagctttctccatccacctcggtatcttctgtgtattcagtcgctgcatcgtaactgtcaaccccggaagcgctgtcgcccggctgaccgtctcccatgccattacccattccctgagtcactacaatttctgtaatctcaccatttacatctgatgacgtaccaccgcatactcatcatcattctggtagtaaggacactctttataatgtccctgcatgatacgtgcagcatcatcctcatccatatctacctcacagtagtaacattcgtcgtcatcatcataaacgttatatacacagctatcacaatttgccatttttgtattcctttctttcggtatcttttttgaagattataccataaccaacatattgacacaattttgattgtattataaaataataatagtaattattatcattttaaaaaggagaagaactatggcaaacaaatacgcaggaacacagacagagaaaaatttactggaagctttttctggtgaatcacaggcaagaaataagtacacttattttgcttccaaagcgaagaaagaaggatttgagcaaatttcttctttatttttgaaaaccgccgacaatgagaaagagcatgccaagatgtggttcaaggaactgaatggtattggtaacacagctgaaaatcttgcagctgctgcagacggcgaaaattatgaatggacagatatgtatgagggatttgcaaaaactgcagaagaagaaggatttccagaacttgctgccaaattccgtatggttggtgcaatcgaaaagcagcatgaagaacgttatcgtgcattattacacaacgtagagatgcaggaagtattcgctaagagtgaagtaaaagtatgggaatgccgcaactgcggacatattgtagtaggcgagaaagctccggaagtttgtcctgtatgtgctcaccctcaggcatatttcgaagttcacgctaccaattactaaggagtttttatgagccagaattttccaaatgatccggtcatgctcttaagctacgtcaatacgcaattaagggatttttttccaactttagatgcattttgtgacagctttgagttagaccgcaccacacttgaaacaaaattaaaatccattgattatgagtatgatgccacagccaatcagtttatctgattgttctgctgacagactcaggttctaaaccgctcattctcataatttatacaccttcttcatttaatattgcccggattgccttataattcgggcaatatttttccacatatccccagaagattttattatgacttgcttctaaaatatgacacatttcatggatcaccacatactccagacactctggtcctttctcatagagcgcaagattgatattgacatgatgtgttttcacattgcaggagccccagcgcgttttcatctgccggattgtcacaccggatacctgcacccgcatcaatttctcatacttctggatcagcttttccactgctgccttcaaaagtacttttctgcgtctgatctccgcctcactcaaagctggtcttaaatccttctgctgtttcagttccttatatttttcctgatattccctgatccacggcagacgttcctccgcaaaactgcggatacgaagatcactcatctgatatggtgcagagatcaaaaccatgccgtcctcttttttgatgcgcagatacatgtttttgatgcgtttttttgtcacggtgatcacaatgccatctaacacgatctgatatgttttttctttcatgtctgatttatgtttccttctattctaaattattattaggtaattacgaaactataatttatgttatgaatgttgtgaatatctctcgataatctcgccaagataatcccgatattgttccaccacccgctccggtgcttctattttcacgatatttcccaagccagtgatccagccgaaaaactggcggctcaccgctatattcactctcgcctggatcgtgttctcatcaatttttctcatcgcaacatcttttccaaaccggtcgatcatcacgcctgttaaagaacggtcgcatcgcagtgtgacagtctcctcttttcctgcaaacattccaaatgtttttttcgagtaagctgcaatatcaaaatgctggaactgttctttcccttctcttttttccacagaaagttcgatttttaacattttatccacacgataatgcttgatgatccccgcctctctgtcgtaagcgatcagataataattttcatcgtcccacgtcaagagccacggactcacctcatatatttttccgtcccggcggagtttcatctccttgctgacatcccactcaaaatactggaactgtattttcacattttcggaaatcgcattgtaaatgatatccacattgtaataaatgttttcattggctgccttattccggtttgtcacaactacctgcctgtgcaattgcgttgcctcgtacttgctacacaatgtttccaattttccgatcagttctcgcgactttttcgttgtgataaatttcgaggactgcactgcatccactaacagttttaattctgcaagttcaaactgacggctggcaagtgtatagccccctgaccgccctggtttttttatgatatccatgccgaaatctgtcagaagatcaatatccgtataaatacttttacgttccgcagcaatgccctgtaatgccagataatcaatgatatcctgcgttgtcaccgcatgctcttcatccgttttttccatcaggcactgcataatatatagaagttttaatttctgcttctccgactttgccattgttttcccccatgtcctccatgaagtctggaattcccagctttctttgttgtgattctatttccgattataatatatccatttttttcatgcaataggggtactgttcactcgtcaatgctaactaaatgacattgcacagtgaagtctaacgtctttgcaaaaacggcaatccggtacatacagggattgccggaagcgagactgctgaaatctgtggtcgtgccgttttggaaagtccgggcataattatccacgaagcatgacctttgcgcagaacagaccgtcctgataggtaaccgtactcactccgccggatttttctgcgatgtgacggacggactgaagcccgacaccatctccttttctcttggaggactgaaagagaccacctttttcccggatgactccgtcataggtgttttcaacctgaatcagcgccaggctgccactgtgcagataggcagtcagcttgattttacgacggacaggcgcagtgcgcaggctggcttccaaggcattttccagcagattggaaagaaccagacacagattgatttcgtctacaggaagacattccggcagatcaatctgcacggaatacgggatattctcccatttggcaagcgcacagtaatacccaaccacgctgtctgctgcccggttttcgcaaaaatgcatttcaagacttggaattctggaaaccgcaccggagagataggctttgatcttttcaagatcaccttcctctgcaagcgcagaaagctgacatagctggtgacgcagatcgtgccgcgcctgccgcacctcttcaatggctactttgaggttttcataccgctgctgctgcagggaaagcagatggttttcctgcagcagccttgcgttgcggttcagactgctcgccatcagcaaaaagacggtattgaagcagagaagcaggatcaaaagcgcaacgctgatgacaaaatgcccttgtaaaatacgccctgtatagagcgtgtccgcatacttggggatcataaacagattcagtgcaatgaacaccagcggcagcacccagaacacataccaggtctgcgcaaaattttcgtcctcgaccatcctccgcacgctgtgcgtcgcaggataatatgcgatggcagcaaacagccagcagatcgcatgatagcaaatcacggttcgcagacagaaccatggcgctgcctgcgcctgcggcaaaccggccagcatagcgacgttgattgcccggcaaaggctgttgatacaggcaaataccgcacagacagataatgcaaccgttccggatttccaaagcgagatccggagtgtttttatgtaaatcacggctgcgagcaaggtcagccccgcaagcaccggcgcagtcggcatgcggcgcgcatagcacaccacgcctccggcggcacaaagcagcgcaagcagcgaggcaagccacaaaacaagctttgacagtggctgctttaagctggattttaccgggaagtacgcaagcagcatgccgggaatcaccacgccgagctccagaattggacgcagcagctccatcataccatacgccccctttgcaacaagaactccataaatgcctgccgggcacttttcagaagatcctgactgacaaacacgcggcttccgtccgccatgcggaaggcggcgccttccagatcattcgcgtgttccagattcacgatcacgccgcgcccgcacacaaaaaagcgtgtgtcatcctttagtggggcgatgaacgtcttgaaggtttggcgcgtggcaagcgtcttttgaaccgtcgtatggacgtagatcaagtgggcgaagtgttctgcgtagacgatgtcctgatagcgcagatggatctcgcttccctccacctttagctccatatatttatccggctgcggtacgcgggcaagcagctcgtccgtcagtgcgtcgatgtccgcttcggtaaagggcttgaccagatagtgcagcgcccgtacctgaaagccctccagcgcatggtcggtcgaggtcgtggtaaaaaccagcaggcagtccgtgttggtttcccgcagcttctttgccgcctccatgcccgtcatgccatccatataaatatccagaaatgcggcagtaaagggcgctttccttgccgcttccagaaatgtctcgccgctttcgtattccagaatatccgcctgtacgtttctccgctgaagctgccactccagccggtctttcagcagtgtgcgttccgcagcaagatcatccacaatcgcaattctcatgcagggttctctccttgtgcttgaatttcaagataattatatcacagtgtgtcgaggataacaaagaacctctgttgggattcgtgccaaaatcgcacctttcgtgctacggcgcttgaaaaaaccgaatggcctttttatactgagcacaagcaagatgcctaatcggatgaaggaaggagggagatctgtgtatcatattgccgtgctggcagaacaggaagcagagcggcagcgctacgccgagcaaattacccagttttgcgtagcgaaggggctgttccctcaggtcatgcagtatgacgaccaggaacgtttttttgaaacggcgctgaaagatgctccaaccaatgccgtcattgcactttccggggtggccgggttgaatgcggcggaacaccttcgttccttatgccccgcatgccgaatgatctggtgcagtgatctggatttctctcttcacgctttccggctgcgggtcgactatttcctgatgaagccggtttccgaagaagcattccagcgaggactgaatgcctggattgaataaacgggcatcggatcaaaccgagacaacaaacacaaaaatggaggatatcaatgaaaaagaaaaagctacaatgttctgtaccaacccttctgctggctggtgtgttgtgcctgacattggcggcctgcggtgcgaagcagccttccgacatgcctgcatcggatacagactccgcggtaagcgctgccctgccggtaaaggccatgaatgccaagcgtgttgacgaaaacccttatatggcaaagagcgacgccaacatccaccacgacggctacaataccgactctacggatgaaatcctgccgcttggcatctatccggagatcaatgtttcctatgaaaaaaccaacgcgaacgcttcgcctgccatttactttgacagctacggccacgcagtcgctccgttgctcggcggcatcgccatccgcgatctgaacgcggaggaaaccacgacgctgggctatttctccccaaagcagcatgacggcggcggttacgtcatccagagctcctatacgttcctggactcggaaaaccgcatcgtctgccccaccagcaacaaccatgtgctgatgctgcggacaaccgatgaagctggaaacgtcctgcctgaatttgaaaaggtactggacattgacatcaaggcagcagccgaagctgcgctcggcaaggagctgacgcagaatcttctttccgtggtctttgactacgacggcaacctctggtttgcaaccggcggcttccgcatctatcccgagcgtgagcagcagggtgtgctcggctacatcgcccactcggcgattgaggcgatcctgaacggagagcagaccgacctttcgaaggccgtcttcgtctacgggctggtgctcggcgagggtgcggaaaacgggattgccgcctccaaggacggcgcggtcatcctgacaaaccagaactgctatctgctgcgtgccaacaacggtgtcgaagctgtctggtgcacaccgtatgagagcgtcggcgctaaagtcagcggcgaaaacgacaagaccaccggcggaggtcttacctggggcggtggctgctccccgtcgctgacgccggatcttgtgatgttcaccgacaacgcagatccagtcaagctgctggcgctcgatatgaagaccggtgagattgttgcaagcatgccggtgctggatgatctgcccgagggctatcaggtggcggttgataactctgccatcgtctatgatgacagtgagggcaccgtcagcactatcgtgtgcaactggttcggcgcaggcagcgcaggccttgccgatcccaacagtgactcttccatccagagctacgccaacatctatgacacgaactggctgacgaagggtaactgcatgatcgcacccggcgtcgaacgtgtcgataccatcaaaaccgattccggctatgagatgaaaagcgtctggtgccgcaatgacttgagcgacacgtcgattatgaagctctccacagcaaccggctatatttacggctatgtgcaggatctggaaagcggcatgtggcagtacatcattctggactttgagaccggcaagaccgtctttacgatggatgtttccaacaagtttggctacaacaatatggccatcgggatgtacgccggaaacagcggcaatgcgctctactgcccgacgggctatctggagctgctcagattacaggatcgcttcgtctatctgcccgaaatgccgtaccgagaggtcaatctcgataaggccgcgcggaacgtactgacacaggaacagtttgagcaggccggcggcgaaggtacggtcgcgagctggcgcaatactgtgacggtcgaaaatgttcatcccaacacgacggtctcgttccggatgaacaatctttccggaagcgccgctgatttgaagctctatgcctacggtgcagacggaaagctggcggaggtcagcaaagagctgtggacgatcacggatgaatccgggactggcgtggatactctgaccgacggcacactgtatgaactgcgtgtcagcgtcgcagacgacggtgcgcttgatctgagcgaggctgaaaaggagatcatcatttccgttgtgctttcaaagtaagtctccagaaagactccggtgcttttggcaccggagcttttcttatagtgctattgtgctatattttttacactatggtaaatttatttcttttgtttgcttgataatgcttcgcatcatagattttttgataaattcatagtctgtccgaaaaccaaaagttttgtgtaaagagtctgttatttcagttcgggtgtaggatggaacgatcagcgtctcatccaaatctccggcaacaacagggacttccttgtagtaaatggagttaaaaacttcttcatctgtttcgtccaaagttctgatatctataaaatctgtcgaaccagcttttctgaactgtgttggattcagggcaatatcacggtattcctgcttcatctttttaagggaatgcgtgatgacataagcccgattcccgatgctgttaaacgctcggttatttgcactttcaagaccggcatctgaacagaaaataaattcactacagttaaaatcttttatgattttcttctccagaggcttaagcgttgtctgctcgttttggttacctggaaaaacatcaaatttcccttgcacttttattatttcatgctatactatagttaagttaataacttaccgagagagatgagcaaggtaataggacgatgagagtcgtcttgtttctttgctctttttttgtttactttgtaaaacaagggaggctaaatcctctgctcaccagagggttcgcattttcctacggaaaacaaggaggattattatgatttatgatgtagcaattattggcgccggggttgtcggcagtgcaattgcaagagaactttccagatatcaggtaaatgcctgcgtgattgagcgtgaagaagatgtgtgcaacggcacttccaaagcgaacagcgccattatccacggtggttttgacgcagcaccaggtacgctcaaggcaaaattaaatgtcagaggtaactttttaatggatgaactttccaaagagcttgacattccatttaagagaaacggttccctcgttgtctgtaccaaagaccaggatcaaagcggtctggaaaaacttttagaaaaaggaaaagccaacggtgtgccggatcttcgcattatcgagcgtgaggagctgatcgcaatggagccaaatttgagtgatgatgtgacctgtgctctttttgctcctaccggcggaatcgtctgcccattccatatgacaatggcgtttgcggaaaatgcctgcaccaatggtgtaaaatttttcttaaacacacaggttgataccattgaaaaatgcaatgatttttaccggatttccacagttcacacggatacaaaagagccggaaatttttgaagccaaagtggtgatcaatgccgccggcgtttacgctgatgttttaaataacatggtcagcgagaaaaaacttcatattaccgcccggaaaggtgagtactgtctgttagacaaagacgccggaacccacgtttcacacaccattttccagcttccttccaaaatgggaaaaggtgttcttgtcacaccgaccgtacatggaaatctgctagtcggtccaactgctgttgacgtggacgacaaagagggcgtcaacaccaccgcttccggacttgattcactcgctgccactgccgcacgaagcgtgaaaaatgtcccgatgcgtcaggtcatcacctcttttgccggacttcgtgcacacgaggacggagacgactttgtgatcggagaagccgaagatgccaaaggattcatcaatgttgcgggaattgaatcccctggtctttcttctgcacctgctatcgctgaaatgatcgctgatattgtaaaaacaattctcccattagagaaaaatcctgatttcgtcggaacacgaaaaggaattctccgcccggatacactatctttggaagaccgaaataaactcatcaaggaacatcctgaatatggtaacatcatctgccgctgtgaaatgatcacagagggtgaaattatggacgcaatccaccgcccactcggtgcccgctccttagacggagtaaaacgccgtaccagagccggtatgggacgctgtcaggcaggtttttgctctccacgaaccatggagatcttagagcgtgaagttccaatgagcatgtttgacattaccaaaaacggtgttggttccaatattgtagtcggatataataaggaggtttaatcatgaatacatatgatttagttatcgttggtggcggtcctgccggacttgccgctgctgcaagcgcaaaagatcacggtattgacagtattttaattattgaacgcgacaaagaactcggtggaattttaaatcagtgtatccacaatggatttggtctccacaccttcaaggaagagctgaccggaccggagtatgcctcccgttttatcgacatggtcttagaacgcggcattgagtacaagttaaacaccatggtcatggatatttcttccgacaaaaaaataaccgccatgaaccgcgaagacggcatgtttgaagttcaggcaaaagcaatcatcctcgccatgggctgccgtgaacgttccagaggtgccttaaatatccctggctaccgccctgccggaatttactctgccggtaccgcacagcgccttgtcaatatggaaggctatatgccgggaaaagaagttgtcatcctaggctccggtgatatcggtcttatcatggcacgccgtatgaccttagagggtgcaaaagtcaaagttgttgctgaattaatgccatattccggcggactaaaacgtaatatcgtacagtgtctgaatgattttgacattccattaaaattaagccatacagttgttgatattgaagggaaaaacagagtcgaggcagttacaatcgctgaagttggtcctgaccgcaaaccaatcccaggcacagaagaacgctatacctgtgatacactgctgctctcctgtggcctgattccggaaaacgaacttagtaaaagtgccggtgttgccttaaacccagtaacttctggtccaattgtaaatgacagtttagagacaaacatcgagggaatctttgcctgcggtaatgtgcttcacgttcatgatctggtagattatgtttcccaggaagcatctgccgccggaaaaaatgcagcaaattatattaaaaatggtgaagaaaaagatgcaaaaattgttgagatacttccagtcgatggtgtccgttacactgttccaaaatacatccgcccgacagaaatggatgacaccttaaccgttcgtttccgtgttggtgctgtttataaaaactgcgccattgccacctattttgacgaccagctcatttcaaaacgcaaacgtccggtcatggctccgggcgaaatggaacaggtcattttagacaagaaaaaactgaacgaacatcctgatttaagtaaaattacaatcaaaattgaggaggcgtaattatgagcgaaacaactcgtgaacttacctgtattggatgtccactcggatgttccattactgttacaatgaacgataccgatatcgtatccgtcaccggaaacacctgtccaagaggtgatgcctatgcccgaaaagaagtcacaaacccaacacgtatcgtgacttccaccgtccgtgtgcagggcggtgtatcaccgatggtcaatgtcaaaacagccagtgacattccaaaatccaagatttttgactgcgccaatgcactgcgtgatgttgtgatcaccgctcctgtgaaaattggggatgtcgtgctttctgatgttgctggaaccggcgttgatgtgattgctgcaaaaaatattgctgcaaaataaaccggagtttcactagcgtagtgtcgcagattctgcagtgcttttataggttgtgaagggcagatataagcgtcctctcacaagtcatgattttataggtttatgaaaagaaaaaacggtataaacgaaatattatgtttctgttcgctggacattccgataggcttcccaagattgttagaatcctttctccatagctcacaaagaaaataatatttgttcataccgtttttctttcatttacgctatgaataacttgtgagaggacgcttatacatgcctactttacgctttgaaatattgctgtataattatagatagataaaaacgaaatggagtaatttcttatgaaaaaagaattcaaagaagcaattgaagattccccgatcatcgcagccattaaggatgatgacggtttaaagaaatgtctcacaagtgaaagccgtgtcatttttatcctgtatggagacatctgcaatattccagatattgtagaaacggtaaaatcttccggaaaaatcgcaatggttcatattgacctgatcaccgggcttagttccaaggagattgctgttgattttataaaaaaatatacacaggcagacggaatcatcaccacaaaacccgctctgatcaagcgtgccaaagaattaggtctgtatacaatccttcgcctttttgtgattgattcgatggcttatgcgaatattgagcaccagcttcgtaccgccaaaccggatctgattgaagtattgccagcccttatgccaaaagtacttgcaaaaatctgcaaattatccactgttccggtaatcgctggcggtctggtttctgacaaagaggatgtcatgtcacttcttcaggctggagttgtcagtatttcttcaacaaatgaaaagatatggtttttgtagatttttcccacaatgaaaaaacagccctttcggactgttttttcgaggagtttagttatgaaaatgttaatctatataaaggaaaattggcatttttagtaagcatgaactttcgctgcttacatcatcaacaagtgcttgtctgttgttctcttgttgatagtattaatatacaaaataaatgtgtacgaattatgtcggttttcgaaaacatttctaaaattccaaaaaaattattttataattcgttaatattttattggtttctgtttcggatatttctcttaaaaacgttctaaattgtatacacttatctgtataatcatattctgccctatatttttccttttatacacaataacgcaaactttataaaaattgccttggctctgaatcgttacacatgttctaacagataccggcttaaccgaatcattgcctcatccccggtgctgttataaaactgtacggttcccggctgtacggaatccgtcacaagtccgtactcttttagtttgtgaagcgtctcacgggctgttcctgcgccgccgtcaaaaactgctacattagaaccaagtactttctgaatggtttccctcaccagcggataatgggtacagccaagcacgaccgcatccactttttttgccaaatgcggtgcaaacaggctttgcagatactgttctaatgcctctcctgaaagttccccacgctctacaaattctacaagtcccggacatggcagtgaaataatctctgcctgattctgaaacttttgcatcaggtcataaaattttttttcacgcagagtcataggcgttgccattacaaggactctcggattttctcttacggataccgcaggttttaatgccggttcgattccaatgaccggaatctctttctgatatttctcccttaaaatatgaatggctgcacttgtggctgtgttgcatgcaaccaccagcgctttcacattttgtttcatcagatactctgcgtcagataacgtaaggcttcgaacctcctctaaagtctttgttccgtaaggggcattttttgaatccccgtaaaatataaagttttcatttggcatcaatgccaccaattcccggagcacactgattccgccaacaccggaatcaaatacaccgattggtctctgcatttcatccatgttattatttcctgctttcttctatttttccaatatgcagcatcttactctgcccagaccgccctgcttcctttatcggtgcggtttaccacaagtttccggtcaatctgttcttttaactctgtgacatgggaaatgatgccgaccatgcggctgtctccggcgaggttgttcagcacctcgattgcctgctgccttgatcgggcatccagcgagccaaaaccttcatcaataaacatcatatccgggtggattgccccagcgcttcgttccacaatatctgaaagtcccagtgccattgcaagcgccgccagaaaagattccccaccggacagcgttttcacatcccgctcgctgtctgtcacaaggctgtaaacagaaaggtcgagtccttcattcgtctttcttcctgtgttcgcctcttcttttaacttaaggataaactgatgattgctcatcgtcaagagccgcttgttcgcctcatggataatctgtttaaaatactgtctctggatatatgtctcaaaatcaatcttggcagagccggaaagccgtccatttgccgtttttgacagacttttaatcacctgatcttcgctttctaactgccttcctctttccagataaacagcactgttctgcagcacagacttgtcattctcataagcagtgtgaagatcgatatatcttttttctgcctcttttaacgtctgcttttctgcctttaactgctcctttagctcagtcgtatctgtaaaagtttttccgctgacctgtttttccaaaagcttctgctcactctgctgttttaggcattgtgtctcgtactctttttcttcccgctctaatctcagtctgctgcgctccggcaggattgcaagatgatagtcttcctccgaggcaaaaccggatttttccagaattttttgatattctttctccgattttgctgcttctttctgcgttgatttttcattatcttcctcggacagtttttgtccttttaatgtattgatcgcttctgacagctccgttaccttctgccgtttcttttccatttcgcgctctgaggcttcgattttcttctgcattgcgtcatactgcttttttgcctcagcaagagaaggatacacaagttcgccctgaatcttttctgctgccctctgcagattggtgtatgtctgttccgcttcttttagctgctgttttgcaatggtctgtgcaagaagcagatctgcttcccctttttctacctgctgcgcaagttcctgctgttttgccttttctgattcaaacgcagtatgcgccgtgtcgcgtttttcctccgctgtcgtcctcgcctttttcgcctgctctacctcctgctccgttaccgcgtggtcagagagcttcgccgggtttggatgaatgagcgagccacaaaccgggcaagggcagtccgctttcagattttgcgcgagtattccagcctgctccgtcaaaaagatctcatacatctgttcgtaatgctttgcagcctccacggcagaaacagaagtcttctcccacttttcctttgccttacatacaactgcttcctgctgcttttgctgttcttttaacgttgcgatctctgcctctttctgcacacaggtgcgtttaccgttctcttttaattcttcccatgcagattttgcctgctgtgcctcctgcaatgcattttgaagtatctcatacgacggaaacgactgctctaaggtgagcatttttttctgggtatccgctgtctcttttttctgctgctcctctgcctcctgcagtgtcatccggagtgtttctaacttctcctgatcgcggagtagtgtctcttccattttggcaattgcctgtgccgactgtttgaccgcctgctcctgtctgagcttctgctgctcaactgccagcactttgtctgccttcaacgcatcctcaatctgctgtttgcggtctttggattccgtctgtctggcttctaactcttttcccctctggcatatttgttccaaggaaacaaaaagtttgttcacctcgtcatactttgtgatttttttattgacttcctccacattcgccctgcgcagattctgctctttctgcgcctcttttacaagttccttcaagcgttccacaagttcttccagtggcagttcttcctcctcaaaaggcgtgatgatcctgcttttttcctgctcaagtgccctctggttttcctgaatacgctcgtccatttccgacgattttctccgcaggttctcctgaattttccaatagatatcagttttaaataatctggaaaaaatcattttccgctcatctgattttgtatacaagagctttaaaaaatcgccctgtgcgatcatgacgatctgcgaaaactgatccgcagtaagccctaaaatctccacgattttggcatccgtgacatttttcttttccgggaaaaccgtgccgtccggcatggtaagctccacactgtgcgccactttctgctctttcacttttccgtttttcaatgttttggtaatcttataatccgggtttctgcgcacccggtaagtctgtccccgataggaaaattccagttccacataagtttccgtctccggcagcgcatactggcttcgcatcatatttccatttcgctcgccaccgcttgtctgattataaagcgcgtaggtaatcgcgtcaaaaatggttgtttttcctgccccggtgtctccggtgatcagaaagattccctgctgctgcccggtaaaatcgatcacattttcccctgcataggagccaaacgccgacatggtaagcttcaaaggcttcattctgtcacctccttctctccattgatcacagtgcggatcatgctgtcctcgtcctctgtcattgcccgcccgttcatctcctgaaaaaagctgacaaatgcgtcatagggatctaaactctccacttcttcctcggaaaactctaaaatttttcttgtccgctcattgtctattttaatttctaaaatgtggtcgtaaatctgttctaacttctctttcggctgataggcttccacctcatcggtcagtgtgatgctcacataatcatggcagttttcttccgttgcagccactaagatttcctctaaatgtccggtcattttgcgcaccctgcgcattggcgtaagcggcagttctgtgatctgcggctcgcttcctttttccaaaagttccaccatagtcactgtcttttcgtcggaagcctcacttaccgaatactgtaatggtgttccgcagtaacggttctgcctacgccccattttctgttttctgtgaatgtgcccgagcgctgcataatcaaacactccaagcactgcgctatccacattctcaatgccgcccaccatgcggatctcggaatcggaagtttccggttcttttcctgcggcggtgtaaaactggtggcttacgatgatgtttctctttgtggtatcaaggttctccctgtctatgacaagccgcactgcgtcatcataagtcgtgacatcctccgcgcccagattccgcacataggaaggcttcacaaaaggcagcagatagatgcaggcctcgccatatgaatccgaaaggcacaccttgttcagatgttcctcaggcgtgactggcggcatgcctgcgatcatcaccctgtgctttgccagaatgttgctcgcaaaatcaattcgtttcgcactgtcgtggtttccggcaatgatacacacggtcacttccggtttcagattattcaatgcggtgagaaactcatcaaaaacagataccgcctctgctgacggcaccggcgtatcgtaaatgtcaccggcaatcagaattgcatccggcttttcacgctctgccaatgctgcaattttttttaaaatatcccgctgctcggcgatcatattataatgatgtaactgctttccaatatgcaggtctgacaaatgaaaaaacttcatgcgcgctccctcttttctatatgatgtatgattgtcgattacgaaccttaaattcaggtcgttggaatatataaaaagccacaacagacaaacatttttcggtcgtctgctatggcagtctgttattttaaaaatccgttgataatctgctcctcggcttctttttccgtaagtccaagtgtcataagtttgattaactgctcaccggcaatcttgcctatggctgcctcatgaatgagattcgcatcgatattattcgcggtaagctgcgggcttgctgtcacacagccgtgatccataataatagcgtcacattcactgtgtcccgcacaggcagcgtttccattcataatagagaaaaactcctgtttagattcgccctttgcgacagaacgtgaaaccagattgcagctacagtctttaccattcatatcaattgcaaaatctgttttggcatactgttttccgtgcgtcatgatcttctcatgcacttctaaagaagctccgtccgcaagatcgcccttagtgatacggactgtcgaatcaattcccttgatctgggttgtctccatttccatgtgggcgccctcttttaaatgcacaatggtctgcggattcataatgttctcaccatttccgtcgccctcgccataatgacgctcaatgtattttacttttgcatttttctctaaataaaaggtatggattccctcatgctttgaagtgtcgactccgcagttgtggattccgcatcctgcaacaatcgtaacatctgcgccctcgccaatataaaagtcgttgtatacacattcctgaaatccactttcacttaagacaaccggaatatgaacgctctcattgaccgttcccggtttgataatgatgtcgattccgtccttgtcctcttttgagacaatatcaatattggcagtggtgtttcgtgctgcttttttcccattggcgcggatattgtatgctccctccgggatctcatgcagtccagccacctgctctaataaatttttctgtactaaatccatgtttcttcctcattttcctgctgcctgtttacagcttccattctttaaaaacattttattacaaatgtaattcgttgttatgatgtaacttatgctttatcgatcagagtctgacaagtctgtgctgtgttcaaaagttccggcagcacttcctcttttgttccgaccttgcgcacctgtccgtctgcgatcacaataatcttgtccgcaatgtcaagaatacgctcctgatgagaaatgatcaggattgttccgttgatctcgtctctcattttttcaaacactttgatcaggctgttaaaactccaaaggtcgattcctgcctccggctcatcaaaaatggaaagttttgttcctctcgctgtgatcatagcgatctcgatacgcttcaactcaccaccggaaaggcttccgttgatctcacggtcaatgtattctcttgcgcaaagacctacctctgataaaatatcacagatctcattgacactcatctccttgccggctgcgatcgtaataagatcttttaccgtcagtcccttgaaatgaaccggctgctgaaatgcgaaactgattcctttttttgcacgttctgtaatatccagatccgtgatgtcctctccgtctaacaggatctgtccgcttgtcggacggataattcctgcgatcatcttggcaagtgttgattttccgccgccgtttggtccggtgatcgccacgaaatgatcgtcaatcgtaacactgacatttttcaaaatctctttattctcgttattatcatctacttcataggtgatgttttttaactctaacataattcctccactgcgcagctatacgccacagtattttttacaaagtaatctgcgattactttatcacgcttctcggatattttaccataatggcatctaacatatcctcgtcaggctcaaattcgtatcttatgattccattctcgcccttgcagatagcttcataaacctttgcatctgcatcgccggatgcaatattcttataggcaaccgatttatcattttcatatttgtaaatgctgcggtcccccttcggtgcgatcgtcagcacatcttccatactaagataggcaattttctttctcttgcatttgttcttgatctttgcaaactttaaatccccgtcataatatgtatattcgtattcgacttcactgcgaaatgcgaacagataccagatcactccaaacaaaatggttggcaccagaaaaataatcggtgtcacaaacatacagcaaactaaactaagacaagtcagcgcaaagaaaatgatcatccctgctttatgtccactggtagtttttttcggaacaataactaatttttcctgcataataaatttcctccaaaccaaagctttgaacggtcactgctatacttcgtttcagtgacccgtaacattcattatatatgattttttttgtctatacaacttcatttttatcatgtaaaataagtttataaaaattttcgcattttttcgtttaggaggaactcaaatgatcacatatcagtatacccaaaaagactgggaaacattccgcgaagggatcaagcgcgaatgggcgctcacaaacggcattggcggatacgccggaagctccctgatcggcgcgcacagccgcacgcatcagggctatcttattgcaagccttcatgcgccgattgaacgctatctcgttttttccaagatcaatgaagctgtcgtggcaaatggcaaaaaaatatcctttgaaacctcacagcatcttgcttccgggaaaaccatctatatagaggggcagaaatatcttaccgatttttcttacgacggaagcgtgcactaccgctatcagacagacgatttttcttttcagaaacatatcactttgaaaagaaaggagaatgtctgtgccgtcgcttatgagctgaacgccggaaacagtgactgtacttttaccctgactccgctttttaactaccgcgagcacagcgagagcagcacccctgacacactgcattttgacacatttgcggagaaaaacacattttatcttgtcccggaaaaaaataaggacattgccattcgttttcaggtgagtgagggaactttctcgaagcgtgaaatggttttcgatacggatatgcagctacagatcgaggttgaccttgagactgccggacttgacagccattactgcccggttgatcttaccgtcaccgttcccgcaaacaccacgaaacggctttctgtcttatgcagtatcggtgttgttacggaacgccctgacaatatttcctctgaggaagcctttgctattttagaggaaaatgctgcttaccacgaaacccttttgaaaaatgccggatatcaggattcctttgcgaatcagcttgtccttgccagcgaccagtttctgacttaccgcgaatccacgaaaatgatgacggttctcgccggacttccgtggtttaccgactggggccgagacactatgatcgcttttaccggattgacgctgtgtacgaagcgttttaaagaagcggaggaaattcttctgacttttgcaaaatacattcatcacgggattgtgccgaatatgttcccagatgacaatatgccgccactttacaataccgtggacgcctccctctggtatttttacgcagtataccagtacctgaattacaatccgtgcaaggaagctgaattttttgtaaaagagcagatttttcctcatttaaaggagattatcgctgcttacgaaaatggcactgactttagcatttatatggaagatgacggactgatccatgccggcagcggcttagaccagattacgtggatggacgtccgcgtcggcgactgggttgcaacgccgcgtcacggaaaaccggtagagatcaatgcactctggtataacgccttaaaaattatggaatctctttgtgaaaaatttggcgaagatgcttctgcttatgaaagccgcgccacacaggtaaaaaattctttcaaccagaagttctgggatacctcccgccagagtcttttcgacgttgtggacggagatgagccggatgaccacatccgaccaaaccagatttatgcggtatcacttccattttccctgctctctgaggatcaggagaaagcggtcgtctcccttgtggaaaaagaattgtttgttggctgcggactgcgctccctctcccccgatcacccggattatcacggaatttactgcggtgcgctcgcaaaaagagatgccgcttatcatcagggaaccgcctggggatttttactcggaggatttttcagtgcctatatgaaggtgaaccaccattctgccgaggctgctgcaagcgcactttctatgttagagcctgttcgaaaacacctcacagactccggctgtatcggttcaatctccgagatttttgacggagatgcacctcataatcctcgcggctgctatgcacaggcatggagtgtcggcgaagtgctgcgctgctactgcgaagatattctgccgtatttgtaaaagtaatggagactatttagacagtacctgggcactccgctgctcaggtactgtctaatataattcaggtgcgaacatactcctttacttttctgcaaattgtcttttcgcaaatttcatttttttcttgacaataaaggttcgttcctttaaaataaactttgttgtgagcaacaagcccagttagctcagttggtagagcaaaggactgaaaatccttgtgtctctggttcgattccggaactgggcattatgcgggtgtagttcaatggtagaacaccagccttccaagctggatacgtgggttcgattcccatcacccgctttttttgttgcttattttcaatctatgatggtgatgtgaatcgaacctgcggttcggtctccgctccgcttcggtcggtgctaagcaggtgccactggcacctagcaccccatcacccgcttttttctttttatgaggaaaccttgaaaaatcaatggtttccttatttttttgctatcgtaatttttcacaaaaaaacaagtgtgaaaaatcacacttgcgtaggttagctacaatatttattttgcattttccatattattcaaagcgtattctatgcattgaatgactactttttagtttaaaacataatgaaagaaatcaacagcattatctttgttgtctgtcgcataagcaatgccgagatagaccgttccggtataatagccattgtccgaaagccattggttgtcggtaagcttcagaccacacggaagcgtttcgcctgtttcggaatctgtggcatagatgattgcatcctgatatagcgccaattcagcctctgtcagaaaatcagtaagcggcatcatgcttccggcatccgcgtattgctgaaacacaaattccggtgcaaaaagtatgtcagctccaccaacagaaagttttaatgtcagcttctggtcactgtaataattcgtggaatagttgtcatcctcagaaaaagtgatagaggtatccaccgaaatttcttctttatctgtaaatttctcctgctggaaaaactcatccgtggaagaaatactttcttcataaggattgagagtattaaccattacaatgtctaagacactttctttataagtagcataatgcacgatcattgaaatcacaaatgccacaagacaaatggcaacaatgatatgccagcggtaataatcccagatatattgaacctttgcttttttcgaaagatctttgaacgctgttttcttctccatgtaaaaacctccattatttgggcgctttttattaacgcgatagttataggataacatagaaaaaagacggttgaaagggaaaaagtatgaagtttatctaaaatagtgctgattttcttttaaaaacgacattatttttatggagaaaattagttgggagtcagcctgaggcataagccacctcgccaaaacggaataaaaaagtaaaaaaatatccaaaacttttttacaccgcatagcaatcataccggattgcttttcctttcagctcataggttggatttttacctgcaagaaacggacttttcagcgggcgttttacaataatcttggaaggctttgcctgaatcgccgcctcaaataattcgacctcatccgaacacggcggttcgagtttctggatcaattgcagttttttattgatgagtccggatttttgtctgccaggaaacattggatcaagatagatcagatctaccgcatccacgcgggtttttaactcctccacactgtttccctcgaccagcttcatacgacctgcgatctcttttaactgcggatgtttttttgcacggcgcagggcgtcttttaataaaaccgccactaccggattctgttcatacaatgtcatatcatatccataggcggcaagtaaaaaagcatcctcgcccattccggcagtcgcatcaattcctttcaaatctgtctcggttgtcttcgctgcacgcacaagcatttcatgcgcaagtctgccgtcacttacccggtggagcatgccttcaaaatctccctgataagtcagtccgtacccggtcagcgaaacgccttttgcatcaaatagaacggtcagattctctcccggcttatctaatattggcacacctgtccgctttgcaaaggactctgccatatctctctgtccgccctttccgatgcagacaactatcttgtcactcatttatcttctccaatttcattttataatttttctatgccatttccaccctgtaattctctgcctgtgagtgaaacagcttataatataggctgtcagtctttttcatcaggttctcgtgggtgtcaaaatctgcaaccgttccaccgtcgatgatcaaaatgcggtcacagaataccgaggaggacatccggtgggaaatgtaaatggctgtcttatcttccacaaggctattgaatttttcataaatctctgcctctgcaatcggatctaaggcacttgcaggctcgtcaagaatcacaagtgaagcttccttatagagtgctcttgcaattgcaaccttctgtccttcaccgccggacatctcgattccgtcttcctcatactcttttccaaaacggctgttgattccgtcttttaaattgtcaattttttcacgaagtcctacctcatcgatcagtcggttaattttttccgtatctacatttttttcctgacaggagatattttctgctatcgtgaagttaaaaagtctgtaatcctgaaatactgcggaaattgccttcatataggacatataatcatagtcataaatattttttccattaatcctgatctcgccgctgtcagccttatacatccggcagatcagcttcaccagcgtcgattttcctgcaccattcaaaccgacgattgaaattttttctcctttttgaatcgagaacgtaatgttttttaataccgctttctctgctttcggataagtaaatgtgacattggaaaattctattgtctccaccggaccggcaaatttctcttttccgctcccgactgtctcctccttcagtttcataaattccagatatggatctaagaaagacaatacctgcagcatctctacgactgcagttccaaattctacaaccgaagtggaaaaattaactgccgcagatacatacatggtcagtgagccgatagaaatcctgcttccaaaacggtctgacaaagtgcgcagtcccacatacacatagcagactgcagcaatcgcatcgttgaccacattaattccacccataacccttccctcttttttatacatctcatcaaacaggtcacaggtttcatctgtaaattctgcggtcttttttatgatcatatcctgcatctgatataaacgaatgtctttctgatactgtttatccgctccaagatttaaataataattgaatttgcggttgatcggtatgacgctctccgtcaccttaacaagcatatcggacattcctttatacaaaatcaaaataacagtgatccccgccacaagcaccagaatcatgaccggtcccaatgtaacgataattgctaaaagcccgatcagtgtcactgctccggagaaaactttcgatacgcaggttacaatgtttgcgatcgcattctggttgccaacagcaaatactgcccgctcttttaagtccagataatacggatcttccagataagaatattccagattcataattttctctgccatgcgctctgtcattctgcgccgcattgcctcttttttcacttctgtcagacgcttatacagcttttctagccaagtcattcccacattatttgcaatgataagtgctccaaaaagcaggatcatctgtatctcttttgctccaagcagctcatcgatcaaaaatttaggcagaataatattcagccaaagctttgccgcagtcgtcacagattgcagaaccaatatcacaatataatcgggtgacacctgccacgccagctttaaaaaacttgttaattttttcattttctcacgctctctaaaataaagttatttatcctgccatgctggaattttcctgataatattttccctgcacggtaaacatatgataatattccccttttttgttcatcagttcctcgtgtgttccatattctttcagtccgtctctgtcgaacagagcaattttgtcacagaacttcgtgctggcaagacgatgtgaaatataaacggcagtctttccttttaccatattgccaaagctctcatagatttctgcctccgcaagcgcatccagtgccgctgtcggctcgtccataatgaccatcggggcatccttgtacagtccgcgggcaatcgacagtttttgtctctctccaccggaaaaatctgttccattctcgtcaactatctttaacatcatctggtctaagccttttgaaaatccttttaccttgttccatagtccaactttttccaatgcttcctgtaccctcgcatcatccacgtttttgtctgttccagccacattttcacgaattggaactgcaagcacattgacatcctgaaaaactgcggaataaagactatataaatcttcttttctgaattttgtgctgtctgttccattgatgtagatatgccctgccgttggctcgtaaagacctgtcatcagcttcaccagcgttgtttttcctgcgccgttcacgccgacaatcgcaagcctttctcctttatgtatcgtaaaattcagatccttgtatacaaagacttcgctgcccggatatttgaaatcaacatggtcaaatacaatttccaaagtatctgtgatcgcaattttttccttatctgtatcggtaagctgctcgtccatcagccggaaggcatcgcctacatactgtccctcattttgcagaaaagcggtatcctcaccaagctttaacatagaggaaagcagcgttgtgatgagggaaatgtacatggtaaaactgctgatcggcatgccatgcagtgtctgataaattaaaattccatacatcagaagattggtgataagcagtgtcgcgattcctgccagactgagcaaatattcatgtcgttccagtttttttacaagtgtcacaagtgtgtcaatttctgcctcatagtttttcaaaatacgatctctgaaattgtagattctgatatcttttccaaacgtaaaatcatgtgttgtcctgtaataataattgattttccggttctgctttgccagcacctcttttctcgcatagcggtagttgtggttctgtctcgaaacccacattgtgacaaacacatgagcaatcagcgccacgaggatcacaggacttaaaccagccgctaaaatgaccattccgagaattgtcacaacatttgccgggattttatacaaatggttcagcattccctctatgccttcctgattgttgttgcaggaattcatcgcacgctcatttttttcccagaaggaagcgtcttccacgtacttataatccattttcatggtttttgcgttaatgtctcctatgtagtggatacgcatacgcatgtttctggattcgatgatgtgctgcagacggctcattgcatagccgagcacacccgcaatgcaaagataaatacacatggctgcgatgagctgctgtgctgctgccgtgttctcctgctccagaataccgattgcgattttcggaaggaacaccgccagaaacggatagattcccgccacggccgtgtatacaagaatacgcggaagctgctttttatcacgctcaaataagtttgtcatcaaccggcggatgaccggaaggactttatacgtttgttcattcatcataaatacccatgcctttctgtaacttcctatatactatcgaaccttttttcataagtaaacacattttctgtaagcggtaaaaataaaatggtaagtggtcggatatttcctgcaaacaaaaaaactgccgtttttgtgattcacaattccaaaaacgacagtttctcattatttataacaatccaaccatatccgttgtgacaatggtaacaaatcttctaatctaacagcatctcaacacatccgtacataccagcgtcattaccaagtcctgccaatgcaaacttagtatcacggcatgccatgaaggatgtctcaacaaaatgttttttgatattatctaataagatgtctcctgctttggaaacgccaccaccgatcacgatgatctccggattgacaacgcaggcgatattggaaagtgtggagcctaaaatctcgcagacttcgtctaccagaccaagtgcgatcgcatctcctgcttttgcagcatcaaatacatcttttgctgtaaggttggcaatctcacggattgttgtctcctctgaggattttgcaagctttctctttgcaagacgaacgattccggttgcagatgtgtactgctctaagcatccatactgcccacaattacatgcctcgatctcatcattgttcacagtgatatgtccgatctctccaccggctccgttaaatcctgcaaccacttttccgtcaacgataattccaccgccgactccggttccaagtgtgaccatgataacatcctttgagcctttggctccgccctgccacatctcacctaaagctgcaacgttcgcgtcattaccgacttcgatcttaagtccggtaaggttgcctaactcctctgcaacgtttaccacgccccagccgaggtttacacagcggtgtaccacaccctgactgtcaacaggtccaggaacaccgattccgattccctgtacatcatctttgctgattgcttcctgcgcaagcttgttatctactgcttttgcaacgtcagaaaggatcgactcaccgttattctctgtgttggtcttgatctcccatttgtctaacagtgttccgttggtgtcaaagaatccaatcttgcaggtagttcccccaatgtcaactccaaatgcgtatttcttcatgatttttctccctaatccatatatttttgcgtctatgaagccttcatagttccgctcacattacccttatgataacgtttccaattttatctgtcaattgtattctatggcaattttggcttgaaaatgaggattcttactcctgcttctcattctctgtcaacacaggatttatttctggctgctggagttcgttttctcccggctgttcactttcattgtcctgcggaagcgagttttcatcttccggctgctggatcagttcgtccgaaatcttcgcatatggtaaaaagtcgagtggctccaatcctttgtgcgctttgttcataaacgactgccagatttttcccggataagtgttacccattaattcctgtaattttcttggcatatcatagccaacccagacacttgtagtataataccgggtatagccgacaaaccagccgtccttatgatcattcgttgttccggtcttacctgcacaaggcatatcaccaagtcctaagccttttcccgttccggttgtgataacaccctttaacacatccgtcatcatacgcgctgcatttttcttatatataagtgtcggctcctcttcttcctgatataaaacttcaccatcgccatttaaaattttcacaatgcaggtcggtgtccggtaatatccgtcattctcgattgtcgcaaagccggatgccatttctagcgctgagacaccattggtaaaaccaccaagtgccgttgccagtctgtagtcagatgggctgatcttggaaaaattcatctcttttaagtacgccaatcctttatccggcgtgatctgatcatataacttccatgcgatcgtattgaccgatttttccaccgcagtgcggacggtgatctccccaagatatgtgccgttcgcattcttcggtccgttctcgatcggttcatcaactacaattgtatccggtgtataattctgctcaaaactcggtgtatacacggtcagcggtttaatcgcactacccggctgccggaaactctgataagcgcggtttaacgtatagcccggaaaatcctgactgcgcccacccacaatggcacgcacatatccattatcgttatcgatacagactgcggaagcctgtaattcataaacaccctcctcatttacactggtataaccggataacgtatcatccaccgactgctgcaattcctcctgcaacgacagatcaatcgaggtgtaaatccggtagccaccggtataaagctttttctgacattcattataaagggaattgtaggtgtcctcatacgcctgctgttcctcatccgtcttaaaatcctcatgaaaaacaaatccctgctgctgcatcaatgctcttgtcgcgcagtagtatgtgtatgtctcaacataatcattttttgcaagcgcctgcggacggtttaatgtaatctgttctgtgaccgcctgtgcatagtccatctgtgagattttaccgtcatctaacatattttttaaaatacggtcacgtctcgctaccgtgttgtctttattggtcaccggatcataaagtgtcggattattgggaattgcacacaaaaaagcaatctgggacaaagagagattttgcacatcactgtcaaagtaacctctcgccgcagattgaatcccatagtatccgtttccaaaataaatgttattcaaataaaactctaatatctcgtccttggaatatttcttttcgagttccgttgcgatatacatttcttctacttttctctgccatgtcttttcctgtgacagaaaaatattccgggccagctgcatggtgatcgtacttccaccctgtttaacttcgccattttgtaccattgccttcactgcacggagcagtgcgcggtaatcaattccatggtgtctgaaaaactttttatcctcgatactgacgattgctgtcactgcatccaccggcatttcctcaatggaaacgtagtaggaatctttttcccctttcagggtggagatcacgctgccgtccgatgcatagacaatgctggtctgatttgttttaaaggtattttcatccgactgccggacaaggcgcgctgcctcctgctttaatgcatcgacttcttttccgtagccaccgtaaaaatagtaggctgctgctccgagtaccaataaaagaagtacaagctgtatccggaaaaaatgccagaacaggcgatgttttttctttctttttgtttttgacatcatgcactcctttccggctctgtgtttctgtccgtggctggcaccacaattgtgccttaccacagaacgattctattattaatctttccagatttctccacggatatgcatgatgtatcctttaaaaattcaggtcaatctcgattcctttcagatcttcattgaccagattcttctctttgaggattttctggatatttttctgtgcctcgtccattttgcttaagttctgtttctgcatggaaacatcctgctcaagttcatctgcgctctgctgcccctcaaggatctcctcctgatttttccgtttctctttcgcctctttgacctgctcgtcctgctcttctttcttgtctgccgcttcctccgctttctctttttcttcctcgatcttgtcatcgacattgtttttgccttcctcgatcaacattccaaggatttctttgttggcagaatccatgatctcgtctgcggcatccgaagctttttccatgtctcttgattttaactgctctaacgtagcatccgaaatagacgccgtcagcgcattcacttcatactgtttgcgctctgcctcgacactgacctgacctttcatgctgtttaaactcaaaacctttttctgatattccgtcagcggcgcgttctgtaattcctttaatcttgcaatctcctcatctgaaaattcatcataagaggaaccgtttatgttattctgatacttttctaaaagctctaaatctttctgctccttggaatcatccgataccccatactcatcctgcaaagactttttcgtattctcaatgtctttcatctttgcccacatatcgtttatctccgataccttggtctgcttcaatccctgcatatcctcaatgtcttttgcagattgattatcccacttccatgcatcactgactacttttaacgcctgttttttcgcgttgtttctgcgcgcttcgatctggctttgtatattattcttctgcacaattccacccgcattgaccgactttacaatattctggtgtcctttttctctgcggatttctgtgttgccgcctgctctgcaccactctggttcgctctgattgcaattgacataagctcactcccccccctgtaaaagattatgttagataattgcgaaactctaatttatgttatgaacgctgtgaaaatgtaacaaaattttcgaagacacgctttcgctacatgtcgctggtaacggtactaagaagccagtcataacctaaggtcattcctgccttctaagtaccgaccgctccctagtgtcttctcaagcttttgtcacatttccacatctcctcttacactttctatgagtttcgcaattgcctataaaatcatttgtatagtgtaaatatcggagaattttgtctatttctttaattcaatcgataattgtgaaacttaaagaaaacgaaaattttgtcacattttcacaacattcacagtgtaaatctgagtttcgcaataatatactatcctcttataaacggatcaaatgataatctatgttcattttcgatagcatctctgcttccctcgtctgacatgtgaaaataaagatttgattttcgaatcctgaaagcgagcgcagcgtctgctccaaccgctcgtcatcgtacatcgcaaatgcttcgtctaacaggattggaagtgtttcttccctcgtcacaacttttccaactgcaatgcgcagcgcaaggtaaatctgttctaacgttccacggcttaacgactgcggtctgacctcttttccctctgtaagaatctgcaattgtccctgctcatcaagtcttacactgtcataagctcctgcggtaaatagagacacatatcgcgaaatctccgcattcagttcatcctgcatatcctcataaaaagattgggaaatccttgtgatctcctgcgccgcaagctccaatgcctgaatgtcctgctccctttcccgctctgccgcactacaaacacttttatttgctaattcctcttccagattaaagagccggttttctttttcctgcaaagactccttccactcggctaacatgcggtctgccaactgcctgtcctgctgtatctgcgcgtctgcggtttcctgattgttaagttcttgcagtcgttccgactgtgttgataagttccggcttatcgcgtgatatttatttttttcatattgccggattgcaaaaaataatgtcagcacaatagctacagtctccccaatccagaaaattgttggagttatgtaaactttcaagaataataacgcaattgcaataataacgataatccctgctgcaaaataaccggatttttctgagaaatccgaatttgttttctttgtcttgccatctttttgcgcaatatcctcttttgtgtctggatgtatctcagactggttatcagccatcgcactgtttttctctggttccatcggattcttcgtgttcccggaagcttcatactttgctatcgaagcacgtatttcttcacattcgcgctctaagagatttttcttaagtttcagtgtctcaagttctgcttcgcgctcctctgtggcttttttctgttcctgctgcagttcacgccgtctcgctgcaagggaagctgtcgcctccgtaaccgtcacgccactgtcagaaccgtccgaagcctttgtcagatattccgcaagaatttttatcatctgatttccggttgcggctcccgcctgtgtaatgtcataggtattggcataactttctttgctcacaccacctaaaagcatggtaagatctccgaaaccaaccgaaagttcttccccgtccagttcatttctgagataatctgatttctctttcgaataaaaattccgttccagataaaacttctgctgaccgaccgtaaacttcaacgcacctgcataaaacgacgatgcgtgccacggttcatactgctggtagaggtctgtggctgctaccctgcctctgcctttttccattccaaaaagcattgccttcaaaaaactgtgcagcgtcgatttcccggcttcgttctttccatatatgacattcattcccggtttaaaggttatatttttgttctgtaactttccaaactgaaaaatttttgcttcgtttatctgcatatctcatgccccaacaatgcgctaacgccatattccaatgctctcgctgcaaccggatcctgcctttttttctgcatggctgcaatgtaagctcccaacagggaattttcatgttcagccatcagtttatcatagtcataatccggtcgaagctgctctgtcacatccacgatccgttccagattcgacaatttatcaagatcgaatattacgtccggatctttgtatccctgtaaacagatccgaaaatactgatatgccggacgttctgccaacaatgcttttatctgctgcatgacatcatatccggtcgtccccggcgtcacctccaccgcttcgtggcaatactcacactttcgcaccggataaaaagagacctcacaatgagttttgccgatgtttcccatccagtatccgtgcacaccggtatcattacagtctgtcggctccagtgcgcccgccatgaccgccctgccctgcacaagctgcccacctttgtggatgtgtcctgctgcaatataatcaaatccatgccgcaaaatcttttcttcagaaaatggaatatgccgctcatcgcctccatgtgcgagcagaatattaattctgtccgtattctggggaaaaacttcatcgtacaaagcctgcctgatctcacgatgccaataactcagaccataaaccgccgtattctgctccgggaaatcaaagcacattacttcctctcgtgggaagaaacagacattttccggccactcacatgtccggtaaaaagaattttgctgtatgtaatcgtggtttcctgccataagaagcactttcgtctgcggtatgcgtgcaaacagaccacagacttccttcaattctctcttcaatggctgtttgtgaaaaagatcacctgaaatcagcaaaaaatccggagattcttctgccacgatctcgatcatttccgcaaaagaatcccagatatcctgcgctcttttttcactccatgctttgtctgcatctggttttactccgagatgcacgtctgaaatatgcataaacttcatgctttgtcctcattttccgtaatcattccattggcttttattgttccatctgttttcccaggaaaccagctgccgcgatcgcaagcttgctctccgtctctgtcattctggatttctcgtctttttcatataaaataacggctccgatcgcatccccctcgcagatgatcgtgctgagcgcctgctgcccgaattctccggcatcatctaatgtcaccttgacaaactctgcatcatttctgcttgcgagaaaatttttccgttcgctgatggcgtcttccagctgtttgctgatcggcttgccctcatattctttcttgccggtaccggatgccgtcacaacatggtcgcagtccgtgatcaataccagatgtccggttgtctgcgccagactttctgcatactctcccgcaaactggctcagttccccgatcggtgaatattttttcaaaataatctcaccctcacggtcggtaaatatttccaaaggatcgccctcccggatccttaaggttctccgaatttctttcggaactacaattcttcccagatcatctattctgcgtacaatccctgtggctttcatttaatttttttcctccaatgctgttatttcactttggagttattatgtggaaaaatcagagaattattcttttctttctttattagccaaaatcaatattttttcatttttggctaatagatgcttttgtatcatagtcatccagaaaatgatgttttacaccgtcctttttgtaagcgacaactgtttccagatttacattttccacacttttgaaaatattgccttccacgtactggttgacttcttttaattttttgatcagttccttgatctccacacgtttcgaacgattttcctcgttattgcaggtggtacaggtgtctgtaaacttgcatgcacactggataaaatgaagtccattatagtcacgccacgccttgatatcgtcctcacgcacaagataaagcggacggatcagttccattccctcaaaattggtgctgtgaagttttggcatcatcgtctggatctgtgctccgtaaagcattcccatgaggatcgtctcgatcacatcatcataatgatgtccgagtgcgattttattgcatccaagctcctgtgcaaaatgatataaatgtccgcgtctcatccgcgcacacaggtagcacggtgatttttcaatattgtatacagaatcaaaaatatccgattcaaaaattgtgatcggaatattgagttttctggcgttttcctcgatcacttttcggtttgcaggactgtatcccggatccatgaccaaaaacttcacctcaaaatcgaatttgttgtgaatttttaattcttgaaaaagctttgccataagcatggaatcttttccaccggaaatacagaccgcaatgcggtcacccggtttgacaagctcatactgatttattgcttttgtaaatttgcaccagatgcttttacggaactttttacggatggaaagctccacatccttgcagatgtctacctcttcctcctgcttcatcgcatccagaagccatgcaatatatccgccttccagacttaccgcatccattcctttctcttccagtccttcggcaacttccacgctgaaacgtccacggctgcagcagattactaatttttttgaaaaatcaatgttctcatttccttcgatggactctgccggtgtcgctaccgctcccggaatcgctccgtgggcgacctcgttctcgtctcggatatcaatgatctgataagtgtttttatcaagtttttttaattcttctattgtaatgcccatgctatgacctttctctatgattttcttacaattatcaagttttctttcggtaaaatattaccttctttgtggggttccgtcaatcattttagcatgaactatgtcatttactccgtaaagttgtacggcaattattaaccaccagttcaactggtggtttgatattttccattttgccaagtacacatttgcaatattatggtatacttaaaaaagattttgtgttatgtagaacaattcaatgttaccaagtatatattggaaaatgagtggaactgcattaagacaaagagagccttatgaggataaaaataaggtctctttgagttttgcgtaaggtggagaaaaaaactagtgtactggcacatcgttgcttttgttcccctgatacctgcattggaaatttacttgctatatcttcaatcgaaagcctttgcattatttttttcacttcattctgtattttttttgttgatatgttactaattgaaagaggtaatgcaatattctcttctatacttagtgtatctagcaaattaaagtcctgaaaaataaaacctaaattttccttacgaaactgcgccgccttttgagttgttaaattggtcatatcttgattattcaaataaatatgtcctgagtctatcgcatctattgttgaaatgcaattaagcaatgttgtttttccagaacctgatggtcccatgatacttacaaattccccttccattaagctaaattgaatgtgattaagagctctttttatatttattttttttccatacgttttaacaatgttttctacgtttaaaattgtattcatacctacggctccttatctaaataaaagattgcatatgagcatgcttattggttgatggagtaaatatatccaaatagtttttttccctaccagcgataatattggaattttatgagtcgctatttttttgcatttattatggctttcaaaaattttattaaaaaaatacccacacaaatacaaaaacatccatggtagtaacgggaaaaaatcgcttgaataaaaacctgaaaaaggaaatccaattggtgtcaatatttttatggaatataatacttttggaactgctaataccaaatgtccaaagcctatatacccattttgtatatttttgaataaaatgaacaaaataaaactcatcacaacccccaaagtaggcggtatcttatcagtagttcttttgattggatacattaaaagtaccgcacaccccataaaattaagtattccaaaccaaatttcttcagacgggattaatacgactgtaataattgaaataaccaaaccacatatgttaaaaaatatacctctctgtaaattacttttaattccccatgtccaaacaaatccagatataaaaataaacgtccaacaaattatttgttgccaaatgtgtattggcatacaatcgtaccacaacggatttctttcataaacaatgaatatatcatataaaaaatgaaacaataccatattaattatcgcagcgcctctaatcccatcaattaaaaaataacgtttttccttattttgcatataattaccactccctttatttattgttatgctaacaattgtaatccataaagttctgtttaattgtatcttggaaaaatcgcttacttttatggaaaaaataaaagagcccagctaatgtatggatagatgtagtataatcatcctcaacatttttgctagtctcttattgttttgactaatcttctatatataaaataatgcgtgttgtaaaaaaaccatccaaacagctaattgccaaattaccatgatatttctttacaattctacgaacattgtttaacccatatccatgtttcccaaatgggtcaattttgttttttgtattttctgaatagttactattaatgcaattatttttaatatcaatacatagtattcctcgatcatatttaatataaatgtataacactggttgcgttactttatttaatgcattcaacgcattatcaagtatattacttaaaatgacattaatatcaaaagtagatacatttagatgccctggaatactgatttgccattgaacatcaacttttgcagttctggctttttcaagcatataatttaagacactatcaattctatcattgcctgacgtgacatattttttctcactttccataaagcttcccattgaatgaagataatcaattacatgttctttatcctcatacctaaccatgtcagtaagcatttttagatgatgttttaaatcatgtcttagagattgaacatttaattgcgagctgtaaataatatcaaattggttttcatacatatgtatttcttgcattagtagctctcgttcttgctcttgctttgttttatggaatttatctagtgaaaatacaagtattgcaaatagtaaatcagcacaaattgttcccaaaatatattgaatatcattagccatgaacgtctgaaaaagaatacatataattatccattctcctccccaataaaaaactggaatgaggaatgtaactaccatacgtcgatatactctcccaatataaaagaatgttactataaataggaacaaaatttctgtcaaaaaaagaattgcatcttgagacgaaattagcccttgaacagttcctctcataaagctattgaataaccaaagtgctacaaaaaaaatgctaacactttttttatttattttatattcccctatataaattcgacaaaaacgcatcaacaaactaatatgaattgcatctataattaaaatacataacttaataacaatcaaaaatttcctcctgaactataacaattctagcaaatagcttttcatcttttttcgatatttctgactaacaggtaataccgtcccatctgttattttcactgattcataatgataagctgaaataaacatagtatttacaatataggatttatggatagccaaaaatccttttccaataacttgcttttcaacttctttcattccgctataatactctattacatcattttgagaatgtatctctatcttttttcctttacattcaaaatattttatttcatcaaaatataatttatgaatagttttcgcaatgttaaaatagaaaatccctttattgttttcagttatttttatacacttttctaatgtttccaatattctttccctagtaagcggctttacaagaaaatcaaatggtctgacctgaaacaaactcattgcataagtttcctttgaagaaatatatattatactaattttctcatttcccagttgctctctaatcttttttcccacctcaacaccattcatttcaaaaagttgaatatctaaaaacaaaagatctgtcctataacctttttccatggattcatatagtgtctcaccagaataaaatatctcaatttcggtttcaattgcatggctatgtgtataattcaaaattatattttctatatcactacacgtacctggttcatcatcacatattgtaatgcttatcatattattttcacctcactctgccttattttgcatatccttatatatatttgtaattctaacttagttttcataaaataacaaacatgtatttttatgaattatgttttccggctgtgcattatttcagaatataaatgatcaaacaaatttctaactagtgtactgacatattgatatttagcattacaacaacttcctattcggaagctgttgtaaacctaggatacaatgaactcaacttcactcttgcatcggcagttcggaactgccaattaacttttactgcgactgtattacgctcgacttcccacgcagctaactcttcacgaagttttgcaatgttttcaatccttcgtgacaagcactgtctggtcattacattcagttctatttctgcaatgtcaagccagctcccatgtttgggtgtatagtgaatttccaaacgcttgataattcgtcttgcctcatctgctggataccttttatacaaggacgccgttttatgggtgttaaggttatccataacaagaattactttttctgcatcaggatacatgacatcaacaagatattttatctcttctgcccagtcaaaggcagtacgttgttctcgcacgctgacatgatgagttcctccaagcggttcgacaaaagcaaatatgctgcaggtaccattcctgacatattccgaatctgttttctgattgtcacccggacgcatgggcagtggtttccttgcatcgcccagtaactggtaaggcttttcgtccatgcatacaactggtctttcaggattgtatgggagttcatatacatcaaggacatcttccatacatgctataaattcggcatcatctttttgggggatgcaccagtagtcgtttttgtgaggtcgaagtttgttttttttaatgctcttcggattgcctcacggctgaccggagtatcaagaacaatttttgatttctcttccagcagccggagagcttcggacacggaaaagaaagaaattggtgacacaataacgatgactcgttttatatggaggtaaggctgtcctctatcggttcagcctcttttgacgatattcattatccggtgtccagcagttaacacgtcctataaatgatgctggtctaaccggttttggcatcaacacaccttaaaagtgccttgaaagaatagcatataaggagatgatactccatgtaagccatcatctcctcataagcacttaacttcgaaaaagattttcaacacaacatatattctctataatgcttgctaggaaatgctaagattcgaatggttggttctgtcgatctacaatctgatggcagtatcttatcgtttacatgggaaatgaaactttatgctgcttcaaaaccatatatatcttcaattgtttcaaaaatctggtatgttttcatttttttacatacacgaaataatctttattttatcaccgaagaacttttttatattcctttacagaaaaatttttcctcgttctcttaaatatgtgatgtttattttttataagtatccagtctattaagcagttcaagattccttttttcaatatcactaaatacactatcatcaaattcctctgcttttacagatggaatataccataattgtcccataaaatagtttttcaaattttcatctttaaaaatatatccatgacgcgcatatatctcatttttagcaagatgtattatcagagaaggaacgcctgaaaaactgtcctcattatagtattctgtgtcagtatagtacaatggatttatgtacatagatatatcttgtacttctctatcattttctaaaaaatctaacacttcttcataataagaacacctatttaaataaacagctcttttttcaatttcatctaaaatctgatcttctgaccaatcaacactgtattgtaataattgttccttttgttctccatcatattctgtactattttgattcgcttcttcttttgataatatatatgttctatctattccaaatccacttgtgttagattcccccatcacaaaatcttgtacactgattttaatcacatttgtttcaaactgaatatataatattccactatttccccatccatcatctgaaaaaggataataacactccccatcttcaatgcggcatataatatctatctctgcaaaccgaccgctaatttcctgttgcgaatacaaatatccgtttagttcattatctgatgtgatttctaccgaaaattctgtacctccctcatatataatactttcatgagattttccttcctctgaccatatacctatataattttcataatcactttgtatacttgtcgtttcttcctctgagaatgctatatctttactttcaatatttgtttgctttatatatccgcaacctgaaaaccatatcaatcccaataatataattactatctttaatttttccattatcaataaattccttttgtatatagtctatcattatgaataaaaactttttgtaaaattaccacacctttgaacatctaaataacatatgtagacgttctttttctatttctttcaaaggtcaatctactcatacggataaagctcatctgcgcaaattatagaataattatcttctagagcctgtgaaaaaatctctgtaaattaggtcttctatgataaaatattaaaatcataggaggccttttattatggcaaacagaaaaaaagaagtttacaaaccaaaaccaatgaccgaaggaaaaagaaatcttatccaggggctgcttcaggagtacgatatccaatctgctgaggatagtcacggcacagcagtcctgtgtgtagtttattctgttattccatcttctacaacaaggctgccctctatcaattcagcctcttttgacgatattcattatccggtgtcgcatcaaatccaattggtaaatattgtatgtcgatttcatcttgataatctatatcataaaaataattacagaaaatcaattccacataaataatctgattattttcttctcccagcgcatatatcaatccatgatccggatcaacctctatcgccaaaagacggtacttatcccgaaaacctctcgttccaaaatatcctttatattcttttgaatcatattgccccaatctctgtatctcttcctcataactcttatcatcatattcgacgaccaaataacttaaaaactgtgcgtcccacggattatagtaaaccattttataatccagtccattcatgttatctgtaatactttctggaaaaatgctttcatccattccccatttatcagcatattcttttttagcattctttccaatgtaccactggtaatgcgtgatatctgtatctttatatacttcagttctctggctatcgaatgaaagcagttttgccagaccacccatcaataataactgaatcaaaaaaacacatataatagtggttgtaaccattaatataactttcatttgaactttgaatttcggtattttcatctcttcatacacctttctgcataattcacaatctgctaaataagaacacctgtttacttattatattttaaaaataaattttcaatctctatcaaaacattactccttttgaaggcataacatattttttcccgtcactatcacagatatgtttccgtaaatatgactgatttataataatataaccctttaataaatccgctaacttataaaagctttcttcatttgatacatagaattcacaattattcaactttacccagattggaaacataaatcgattatcatcacataactgttttaaaatttgtgtttctattatattcagtgaaataatcactcgaaaagaaatattttttgcaaacaattttacattatgcaataatactctaatgattataaaactttttttctttcattttatcatctgtcaaatttacgtatctaactgttaaattcccctatattcatcataactgtcagaacaaattttccatcctgcgtctcgattattacatctccaccatatttgtccgcaactttttgaatggagcttataccgtatccatgtctgcggaaatcatttttggttgatattaattttcctattttgtcctgtttcaaatatccttcatacggattttttatgacaagaaccaatgactgctttttgattcccattgctatttcaatatccttgtcatttccagtgcatttttctgtggcttctatcgcattatcgagcgcatttcctaatactacccccagatcacactgatttaccggcagctcttccggtataaaaatttttaaaagaaactgtattccattctctttggcaatcgaatatttggtgttgagcagtgcatctatcacctgatttccactgtcagaaatataattttctgtatgattattctcgattattttgtcgatttcacgaataacattttctttctctccctgctctatttcgttttttaatacaattaatttatttatcagatcatggcgttctctgtgaaaatcttccattaactttttttgttctgttgtattattagtcatcatatgaatttgctgctcatataccgttttttccttttcgagcataattttttccgtaatttttgaataaacttcaaggataatcatattgaacagtaataatatgctgaaaactatcatagcagtcactgtattattttctgaaaagaacaccgctgttgcaatgtaaatactgccgattgatacaaagaaaaatacgatataatattttaccggaatcaggctgttttcccttttcttccatacaaaagacaaaatgtatgttcctatcagcatgattatttttgatataatacttcctatcatattaaagtctctttgttcgagacaaaataaatttaaaaagaaaaaaataatcatttctaccaatgcccatactgcccaaaagaacgtaagtaaaaatatattattttttccaaaaccataataggaaattgctgaaatcatgatacacagcaacacatttacaatcgtagttacagctgacgcatcaccactgtgaaactggacatatccttgaaaaataatatatatggaccatacacttacagataatacattccaacgcttcttttcataaaatgtatctaaaaatcttcttactatccagacacttgcgaatgtcaaaactgaatttaagattatatttcccacattacacatagatttcacctcttaacagtctgccatattctttactaaattctttctgccgatcttcactaatcggcaacacttctccgtttatcaatgttacattagattttgatcttgatttgatcaaaaggtaattgacgagataagactgatgaatccttagaaatgttacttttccactgctaagtcctttttctacctctgataattttccattaaacacatatttatttccatctctgacatgtatatttatttgtcttgctttgctttcaaaatacaggatctctttgcacaaaactttgtattcctgacttttatatttaaacgaaaagaaatgatttctactgcaaattctctggtttgcttctaaaaatatctgtacgaacgaatcccggtctatcggttttctgataaaggaaaacacatccaagcgaaataattccatgacgtatctgtcatagctggaaataaaaataatcatcgcatcttcatcttttttacgaatgtttttcgccgcagtgattccatctccattttccatctgaatatccatatatatcaggtcaaactttttccctgaagatatttctcttaccagatcatttccactatagaaaacatcggtatctattttcacattttcctcgtcaccaatattatgtaagacactttcaatttgatgtgcaatcagatcatcatcatcgcagattgcgatatttaacattatttttttcctccaagaacactgtcattttttctatcttactatatagattttgcattctcaatcttcatttttatttacattaaaaaaactgctgcaccgcacgatttttcatcgtcccggcacagcagtctgtgtgtttaaatttattcagtcactccaccctcaacaacaaggctgtcttcataatcactgccataggtgtctactaaagtagcttcataatcagcatggaagaactgttcatcacctaatgttttgatctcatcattgatccagtcaagcaaggttgtatttcctttggaaactgccggagcaatcgtatcattacttccaagggaaggaatccctaccgtgtaaccggtgttctgaagtgcatatgcgataacctcggtgttatcgtttacccatgcagcaccgcttccattttccagtgcattctttgcagttgcataggaatcatatttctgtaatggaatatccgggtagttgtcgatcatgtaagtctctgccgttgttcctgagatcacgatcatctggtcattggaatcccagtcatcaaggctctcgatcactttactgtcaggggataccacgccaagcgccacattcatataaggaagtgcaaaatctacttcctctgcacgctctgctgttacagtaaagttagcaagaataatatccacttttcctgtctgtaaatattcaattctgtttgctgcctctgtggatacgaagttcacatccactccaagatcctcaccaagtctgtttgcaaaataaatatcatatccctgatattcaccattttcatctacatatccaaatggatttttatcggagaaaacgccgatattgatcgtaccgctctctttgatttcatctaaagtacggtaaacttcgctgcttccattggatacagttccctcatctgccgcacttgcattatttgcggttgcatcacttgtgcttccaccacatgcagtaagacctgctgcaagtgaaagtgttaatactgctaccaaaatcttgttccatttcttcataataatctctcctttttcctcattatttcacatgagtttttgcctcatgaaattcaaacgtattcaaaaactgttttgcacggtctgtcttcggatgttcaaagaactcttccggagttccctcctccacgatttttccaccatttaaaaagatcacacggtctgccactgcttttgcgaactgcatctcatgtgtgacgatcatcattgtgcgcccctgggaagcaaggtctaacatcacatccaaaacctctcttaccatctctggatccagcgccgcggtcacttcatcgaaaagtaaaatttccgggtgcatacaaagcgctctcacgatcgcgacacgctgtttctgtccaccggaaagctgtctcggatagcttttcgctttctcagcaagaccaacccgctccaaaagcgccattgcttccttttcggcttcctcttttttccgcttctgtactttcattggtgccagtaaaatgttgtcaagcaccgtcaaatgcggaaataactcatagctctggaataccattccaatcttctggcgaagctctgcgatgtttttgttctttggatcaattttttcaccatttaatttgatctcgccgccctgaattggttccagagcgttgatacatcgaagcatcgtactttttccacagccgctcggaccgacaaggacgatgacctctccctgatgtacttccagattgatatcatccagaatcaggttatcatcataactttttttcaaatgttctatagataacaatgtctgttccaagaaagatcacctccatttcctttccagatattttgcaagcatactgattggccagcatgcgataaaatacaataaaaatacggtcagataaattccaaacgctgcattcgggctggacatccggtttgcttcgataatctgctgtgccaccttcaacacctcgacaacaccgatcattaggatcaggctggtcgtcttgatcattcgtgtgatcaggttgatggacagcgggatcagtctcctgacggcctgcggaatgataacgtagagataagtctgcattttggtaagtcccagcgccgcactgctctcgtactgatgttttggaatggagatcagtgccccccgcacaaggtcgctcatctctgcggtgccccacaggacaaacacgatgatggacgctgtctctcccgacaaattccagccaaaagttctcgtcgtactaaagtaaaacaggaaaagtaataccaactgcggcataatgcggataaattccagatacactctgaaaattgccttgagcactacattttttcttgtcatcagcacgccaaacaataagcctaatggaatactgatcacaactgcgatcagactgatacggagtgctacccagagtccctggagcagccgcagcatattgcttccttttaataaaacctcaagccccaaatccggcataacgcagcctcctttccagcagactgcccaaaatggaaatcggcaataataggatcagatagaaaaccacaagcaggaataaactctctgttgtcttgtaataaagaccgatcaggtcttttgcagtaaacatcagatccatcaggctgatcgcactgaacacgctcgtttccttcaaaaggaaaatcacatttgccacaaatgccggaacgctgatggacattgcctgtggtaaaatgatgtaccgcatggtctggtaacggttcataccaagactgtacgcactctccgtctgaatcggttcgattgcttccaatccgcttcgaaaagcctctgccatgtaacttccacctaaaaatgcaagtccggcaacaccacatgcctccgcatttgtctggattccgatcttcggaagtccatagtaaataaagaataactgtaccagcaatggtgtatttctgctgagttctatgtacaccgccacaatctggcgaagtaccggcactttataatactggatcgtcgaacagacaaatccaacgataattgcaaaaacaattccgaggagtccaatgcgaagcgtcaaccaggcggctttctcgtacatcggtaaatattttagaataaactcccagttcaagatgttcccctcctctttcaaaatttatagtgcttatcatagttcttttatcctactatgtcaataggaattatagtattaattgtattaaataaaaaacaatatcggaattatattgtaaaatggggatatatggatttcatcttctatgattattatatgaaaagaaaagaattgattacctgaaaataaaaagatgggcagcaatatcggatgacgatattgctgcccggtgcttatttcatctcctgaatcacacacccgtgttctttcgatttttcattatagttaattcctaccaacaagatgtccccctgataacctttaagcacacttgtatactttttatccaatatctgattgagtgctttctgttcggactgattccattttagttcaacaatgagtgctggtttctggcttcctgctttcggaaagaaaagaatatctgccacaccttttcccgccggaatttcttccatcttagaataataatccatgctgcttagataagccatcttaatcacactgcgtaaagcctgctcattattataaaacaccgatgcagtatcctcattatgaatctcgttcacaatctcagctacttttcttccatctttttcccaagttgcctgcaatattgaatctgaacgcagtaccgccttcatcagttcagtacgatttccattttttattgcacggataaactcttccctgatttccacattcggtatagaaacacatcgtttatcctcatcataagcaagatatccgagatggatcaataaagtaagcacatcatccctgcttttcatagaagtcatatcattctgaaaagatcccgtatccacttcacatttttcgccgccaagcatatcaaccacagtatctttcaagccatcaaaattcatgtcaagataattgcgaagtgcctcatatgtttccgtcttagtccaatagctgctatatttatctctcaaaattgattccatcaccgatttcggattataaacgtgaacacctccaacggtataaccatcataccattcctgcataatggtataatctttgtcatatttttgacataaactttttacttcctccgttgtaaaaccgatatattcctgcaatggtctaggctcaaccatggaatactcataaaaatcactgaccgcagattcatgtccgtatttttttattggaagaatacccgtcatgtaaacgccagcaaaaagttgatctgtcagactgctcttgaaaagggaacggagcagtaaaatgtaattatccagaatttcatctgcccctttacactcacggaacatggcatcccactcatcaataatcaatattaatttacgtcccgtaatctggttcattttacacagagaatctaccaatctgtgctccactgctatttccggataagactgtgcaagatcatctataatctcctgctctatctgggctaccaacatatcactctgctttaaagttgacaaaaacagcgtgatatcgagataaatcacatcatattgattcagattctgttcaaatgacactgcttctgcaatcttcaaatctgcaaaaaggtctctggaatcacatccacggctataataagcacacagcattttggtggcaaatgactttccaaaccgtcttggtctgctgacacagattaatttttgcggtgtattcagacaacgattcataaaatcaatcaaaccagatttatcaacgtattcactatttctgatagaacgaaacccggcatttccaatatttaaatattttccaatcaatttttgtttcttttgaacagaagtcatattctccatatcattttcctttctaaaatctagtccaccgtggactacttttccatcttcaacttcggaaacggaatgatatccggctgattttccctatgctctccgataaatttttccatccagaccatgtcataccagcgttggaacttataaccgcactgatggaaagttccgaccatcgtataacccagtttttcatgaaacagcacgctgtccttcgtcagatattcatcttccgcctgtggataagcaatgcaggcattgacatttaaaataccctgctgcttcaaaatattttccagctcttcataaagccttctgccgattccgctgcgtttctgctccatatccacataaatggatgtctccactgaccagtcatatgccgctctctctttgaacggactgacataagcatagcctgcgatttttccatccttttccgctgccaggtatggaaaacgctccaatgtatgtctgatcctgctacggaactcctctatggacggcacaacatattcaaacgtgattgctgtctgctcaatatattttgcgtagattgcaagaatctcctctgcatctgcctctgttgcaactcgaatcgttgtcatagtttccctgcctcttttccattcagtattccatccgcaaaactatatctttgatgtttttcttctgctcacgcaatcacatttcaaacgctttcttaatgctgtcataatgcaaaaagattccctgctttgcaaattctttgatctgatctggcgttgcaaacatgtagccatctgtttcctctgtctgaagatgcaggtctttttcgtcaatatccatgacaaaacgatagacatccacaaagtaattatcgccctcacccggattttctctcttataggtaaataaatagccgccctcggcatttcctgcatccagtcctgtctcctctttcacttcccgaaggactgcctcgtaagactcctcgccagcctgtgctgcgccgccggatacttcccaccagcccggtgcccatgcctttgtcatgacgcgctttgtgataagaaacgttccatctggtcttgctacaacaccgagcaccgtcagatgatattcgccatcctttaagcaccagtcgttgcgcttcatggtgcgtcctgtcggctttttatctgcatcataaatatcccataattccatcgttttctctcctgtttatacatgctatttatcctatcttatcatttcactataggcaatgcaaacctcatttttatcatttactaatttgtttataattgctataatacacattagccgtgattttagccaaaatcaactatcaaaatttattactttttactagaaaagattcgaggttttacagatgagtgagacaaataatcttaagaacgagcgtcctgtgtacgcttttaaccgaaaaattttctgtgagggaatgcgtgacggtatcccgatcgccttgggctatctggcggtatcgttttcacttggaatcgctgcccggaacgccgggttcaatccttttcagggatttcttgcaagtttactgaacaatgcttctgccggtgagtacgccgcatttacgctgatcgctgcaaatgcaacctatctggaagtcgcaattatcacactgatctccaatgctcgctatctgctgatgagctgtgcgctcacccagcgttttgcacccggaacacctttttaccaccggctgatcatcgcctatgatgtgacggatgaattgtttgggatcaccattgcacgccccggctatctgaatcctttctatacgtatggagcgatcatgctggctgcgcccgcttggtcggtcggtaccgcactcggaattatggctggcaatgtattgccgcttcgggtggttagcgccctgagtgtcgcactttacggaatgttccttgcgatcattattccaccggtcagaaaagataaagtcgtggctgctcttgttgcgatcagttttgcattaagctttgccagctcttatcttccggtcgtttcttctctatccagcggaacgagaacgattattttaaccgttgtgatttcttctgctgcagcaattttgtttccaagaaaaacggaagcataatgtatatgcttccgtaagtgaggttttttatgacacatcataattttatttatatcgctgtgatggcgcttgtatcctacgccatccgtgtgttacctttaactttaattcgtaaaccgatcaaaaaccagtttattcaatcttttttatattacgttccatatgtaactctggcagtcatgacatttcctgcaattgtcgaagcaacacaaagtccggttgccggtgcggttgcactcgttgtcggtattcttgccgcgtggtttggtgcaagcctttttcaggtgtccgttgcatgctgtgcggttgtgtttttgattgagttgtttttatagagtttttgtgcatggctggccgtatagaatccttttattcactgctccgcacaagatcattctgttatcaggtcagcatcagattttttttctgagcaggaaatcaatgatattcatatgaacgattccatcatggctcatatcaagtttatcaagagacatcacatattttggagaagcatctgttatttcaatgacgccctaaacgacgccagagccttctcaaattcttttacatgctgcacttcatctaaaaaaatgtagtattttccatcctcacaaaccctgctttttatttccctgtgcagatccgaagcattctcaatataatcataatccatgtcttccagatttaaatatatcatatggtctccatgtacgccacgctctgccagttcgtctttgattgtttccagcaaaatcgattttccggatcttctcaccccggtaatcactttgataatatctgaatcataatatggacgtatctgttcaagatatacttctctttttaaacgcatattgtgcaaatttattctgcgcattctgatgccattttatgcaaatataactttttaagctgccataaaaacactttcatttgtgtatagacaaaaatccccgacggactgcttctgatatgctcataatacagtccgtcagggatttattcatctctgacaaaatttgtgcttatttactttacatccattataatagaattttatttcctgatctgattcagtctgtcatttattgcaagcaattgttctttactcacttcgtttgttttctctgcttctccggcctgacttgtcatctgactggtaagtcccatcatattgatcattcggagtactgtgaatccactcagcatcttcatcatgccactgttcattccaccgccttgtgcctttgcctgtccaaagctctgaaacaattcctgcatgactttatttccatcctcattcgacataatatcgctcaccgtatcatttaacgagaagaaaccatccggtgccgtgatatcaaaccaatttaaaacagcacctttttctttcagacggtacgcttcattaaacttctcaacttttttgataaagctttcatcccggcattcgcctgccactgctagaagctttgtctcaccctgattcggtacttcaaagtaaaagaaatgatcagaagcttcttttttgccaagactctccccatttgcaaaaagttccactgtcttctggttcgaatatacggtgacttttgtcacattctccacacggtcaacgtaacgttttccacaaatatgaacgaatggttcgtccgacagccatgctttatatgcataaaaggcatctttcttatatttgcggtcaaatgtcaccagccctttatggttcatgccattttcaccgccttcgtttctggcatctgctgcgaaatcaaacatattccatacgtgcgttgcccagatatatggtcttgcatacaattgtttgatcaattcctcatgataatgtgcctgatattcctctgtataatctccctgcttcggatctgaggtatgccaattcagtgcttcacatccatattcactcatgccgatcgggatctttggaaactctttgtggaattcatccatccacggaccattcatcgaagtgtctccaccataccatccaaaataatgattataagaaactacatccgggatctgaatatacggattatgcatgtcacacatcgaaactaccgccatagttgtcagccttgtaggatccatctcatgtgcaaggtcatttaatatgtgatggttttccataaggtcttcgtctgcttcacctgacatcgtaatttcattggataatccccatacgacaatacttggatggttgtaattctgaacaatcagctccttcatctgactgatcgtattttcacgtccgtttttcatgtgctgggaaatatacggaatttctgcccataatacaagccccttttcatcacacagatcatagaaatattgtgcatgctgatagtgtgccagacggatcgttgtagcgcccatttcacagattaaatcaatatcttctctgtgatgttctggaagaagcgcatttccatttcctgcccggtcctgatgtctggacacaccacgcagtggatagctattcccatttaagaaaaatcccttatcaggatcaattgtgaaggtacggcatccaaatcgtgtactgacactgtctatgcatacgccgtcttccattaagcatacagtcgctgtatacaaatatggatctttgcgtccattccaaagatgtacatctgttatttccagattgacctgtttatccgaaatccctgttttggtttctgctgcaagaacaccttcagcatctgtaatctgatataccagctgctgacctgctttttccccgcttaaaaatacttccacggcaatttttgcatttttgtctgctacctctggtgtcactttcaatccatttccaccataatagtccagatcaaaatgagacttatttacagcaatgatatttacatccctgtacattccaccataaaaagtaaaatccgctttctgtgggtataccctgtcatttgcactattgtccacggcaaccacgatcagattctttccatctgtaagtgcgtccgtcatattcacccgccaggttgagtatccaccatcgtgatgatcaaggtgatttccattcacataaacatcagcagatgcattcactcccagaaattccagataatactgttctccctccggaagttcctctttctggacttctttcgcataaaaacaggttccacggtagtaatcgtttccaccatcctgtccgtcaatcgcattccaggtatgaggcagattcacccaataccaattttgtggcatagcaaccggaggctttatcgcttccttgctaaatgcccatttttcgtttaagttaaaaatttctctcatttattcctctttctcagactcattcattcttttcttcataattcattttctttaaaaatgtcattggcgacatatgataatattttttaaaagcacggtaaaagttactgtactgtccaaaaccacataatgaaaaaatatccgttggtttttccccactgatcaataattgtcttgccatgatcatccgtttttccagaacatactgatatatgctctttcctgttgcattttcaaaacttctggacaaataaaacttgctgatataaaaacggttacacaaaaaatccagtgtcagattctctgtataatgtaaattgatataccggatcacctgctggatattcgcatttcctgccattgtattcagatttaaatgtctctccagtaagataagcagatgttctaccagcgaatcacacataatgtcatggccaaattctttctcatgcatttcatagcgtaattccaaaagcatatttatgatttttttccgcattgccggatcttcccggagcagatatcctttcttctctgccgaaacaaaacactggttcagattagttttcctgcttgaaatgcggttcagataccatggattcagccaaaggatcactctgtctgcctccccctctgaaatcatttcctgatgttctgtcataggaggaagcagcacaatatcttctttctctaattcaatttttttgccatcgactgtaaatgttatgtttccgtctaatgcacagtagatttcaaaaaaatcatgcagttccactcctgcattttgtatcgctgtggtacaaaaacgatgcacttccatgctggaactggtcatagattgataccctaagtattcatcatatagttcattatttttcatctctgtatattattataacgccttcttttctgtttaacgtaatctcaatgacacctttttcgcgttctataaattctgcctttttaccatctatttcaacatcatagtgatacagcgaattcatgacaatcagaagtgcgcctgtatgtgttcctgtggtactgtatacaatttctgcatgatccacatcctcagaaatttctttcttttcaatccaggtatcatatccggttgttaaagttcctctcttgtagtacgcattataccatatagaaattggagtagaaagtccgctaaactggtgaaaccagccgccacgttccgtttcaatctgtatcatttcaaatgtattataactgaattcaatctcctgcttccaggaattcagtcctctgtgtgcaatatcaaatgcaaattgtccctcacctatatcaagcattgctttccataagaaatactgatacggacaccagacacttccgttccaatagccgttatcgtaataatagctggcagacatatcaaccgtagaaattccaaccggggaccacagttcctctggagatttcaggtgctttaacaactgtttttcctgctcttttgagcaaattcccgcaatcaacggcgtaacaccatctactcccttattataattttctcctgcctcagtccgcaaaatatggactccatcatgcccctgcacagcatagccaaaatatccgctctcttcatcccatgcatatgccagcaatgcgttctttacacgttccatatcctgctcaaattccggcagattctcctcatatccaaatgccattgaaatttgtttcataaattttgcaatacggataaaatgtacattactgcagaccggtgatactagctgttccatattctttcgatgtaactccacctgcggcggataatcgtccattccacttgcattgtaaaaatagtcataaactgtcagaagaccatttccaagtcttgacattgtggatccttccgtcctgccagccatataacgatagtaacgtaaaaacatcggatagtatttcttcaaattttcccgttcttttgcatccgcccgatttaatatctcgtaatacaaataaaactgtgttgggacaagtgaaccatgtgccacaaatgcgaaatctgtattatctggttcggataagtaagtgtccattacatattctgcaagttttgaggaataatctaacattccaagtccaataaatccggaatcccacgtatacagactgtcccatctttttcccggtgtataatgcgcaatgtattcaccatgccgcctgattggatacacaatattactatataatgcagatttcatcatccgtcctgtaaattcaaatggatttccctcttcattggcacaattttctttttttacaatgcttctgcattgtttccagaaaatttctaattcagcttttgaataattacgttcttttgtactgatgcatgcatattccgttctgacactttttccgggaacaaataacgcttctgcaacattaatatgataaaagccttcatccgaatgtttatcctgaaatgcacccgaaaaacttctcgtcagattatcataagtggcatctgaatttgcaaggcgtgatactaatgcatcctcaatacagcccgaatacaattttctgcttctgacacgcttgcttaaaatgctaagatatattggattttccttataattgtactgatattttatatgatcattctcatactcaacttttggaattacattacgagcctcttctgttattccgacttcctttttgtctgatttttcacaaatacataaaaaatcaagcataataccattattctgctcattaaaagcttccatttcaaagaaaaactctttatcagaaatctttcctatcggaacataacagattccgctctcctttgttgccgcaaaatgaattgttccaacattgctatgaagaactacgtcctcctcatcctgtaatgtgcggtatcttactgccagcactgcatcctgatatgattccaccaatttcatccggtaagaaactttatcacctttattgccaccaaatgctttcaatcccagataacgcataaacaatgcataataagacattcccagcccattatcatccgtaaagccatcgaccggaatctctccctttttcatggcatccagattcaggtgttcccatggaactgcttttccaaactccaaattttcataatcaacagcattccacgcatcacttttttccggcacttttttcgtgtatactctgcttttcggatattcctctgcggcaaaataattgataaggcaattctggtttttatccgtattattatggaaggaaacccggattccccaggtttcctcctcaatctcaaagaaatctacgtctgcatataactgatctttccaaagaagctcatagcgatatctataatattttccattactatcacaatcccacggatgatactcagatgggattgtaacgtttggagccggtacattgctgttcgcataggtcggatggatcacgaaatcaaatcttgctcctggaacagcactctccttcataattcttgaaatacccatatactttttcgaatatggtccccacaatgggattatatttttattttcgtctctcataattatgcctttacagcatttttctgctgtgtttcagcaatgctgtcctcaatctccttcattttttcaccagtcaatggatagaacttcattgcaataatagaagcaatccagcccaaaatcggcatgccacagaataataaaattgtaatcatcagaatttcaggtgtgcttgcatctcccacctgtggcactgaatttttatatcctatgacagctacaaatgctccaacaattgtagttgcaaatgatgaaataagtttatcaataaaggagtatacggttgcaattagtcccggcacataatgtccacttctatacacttcataatcggtgcagtctgccatcattggaatcatcatattacttccgatattacgaattccattcaatgcaataataagaactacaaatgcaatattcataaatccaaaggacttcagatcaatcttggttggatcaccaaaaatcagaagcagtgtaattgcgagctgaacagcaatacatccatatacagtcgctacatacgtctttttctgtccggaatgtcttgctcccataatacctattacaagtaaaataatatttggaatcattgtgatagcagacaatcttcccattactgcatagtcaccaataataattccataaagcataacacctacgatagaatttcctgcaatacttgttgcgagtttatctgtagactcggaaataactaacatctgaagtgctctgttgtgttttaatacttcccaataggttttgaagctgactttttcttctttattttttaccatgctgttgtagtattccggtttatcttttggagcaatggcaatcagtgagcagatcattaatacaaaagcaattgcaattacccagacaatgatctcactgaagaattcaagtgtcattccgccatatttcggaacaaggtaattggaaacaagcattgtaattccggtctgtaagaacagcataaaaaagcctgtaaagaaaccgtaaatcggtctctgttttggatcgtttgtaagtaaagtctgtgcagaagttgtgactgttccctgaacggtataaccaataatgtaaagtgcatacacaacaataaaatatggaatccggagtgtttccggaactaaatgcgtggtcttatataataagatcatgcttaatgcaagaagcgcattgccgacaacaaggaatgggcggaattttccaaaacgtccattggaatgatcgatcagccatccaatgatcggatctgtaaatccatcaaaaattcgcatagaagttgccagtgtagatacaaatactacagacattcctaaaattccatttgcatagtaagatacatacatcattaaaaacagatacatatttgttgacatcatatttaatgcaaacaatgcgatctgccatgttttcgcacggttatatttcgttgcttcgttcattgtaattcctcctaaaaacattgtttaacattttcaaatcatgattttaagtggattttagcattgaactttttcagtgtacattgcatatattttctataacattgcgattattgccttgactctccaagaatttactccacctgcacctgacacattctcatggtagccaatgctgcttcatggctttctggtgtgacacctgtgcagcaggaagcaatgactttcaccggaatttccggaagatatgccttaattagtgtctgctgattaagcagctatttgcagtttccgactcttatatcagttccaatcatgcaaaaattggaactgatacaaaaaagtgcaaagtatttgtctcagaatcctgaacagattcgttacgaatacagataatgcgatagatgtcatctgcgtttctatagtggctgcgaaatacttacaattcgttgctccacagaatggactctgttatcatacatatactgttgcggctcatacagcctgatgatggtaagatataagttgatgtccttacctgtcatggtgtatccttcactcatgaactgttccagataccggagattccttttcacatatgaaagctgtttacgaagtgcgttcaaaatccttgcaattattatagcagaaaatggggtaaaagtcagtaaaatcaagtgttttcaatttgttcagcagacactaattatggcaccgttttggcaccgctgaccgcactttcactgttacacagacgtaaaaaggctcccgagaaaaaatctcggaagccttgattttactgaataatttttaattactcgatgattgtagcaacacgtccagaacctactgttctaccaccctcacggatagcgaatgtaagaccctgctccatagctactggatgaattaattcgatagtcatttcgatgttatcacctggcatacacatttcaacaccatctggtaaatcgcaaacacctgtaacgtctgttgttctgaagtagaactgtggacgatagttgttgaagaatggagtatgacgtccaccttcgtcttttgttaaaacgtaaacctgagctgtgaattttctgtggcatgttacagtacctggtttagcaagaacctgtccacgaacgatctggtcacggttaacgccacgaagtaatgcaccgatgttatcaccagccatagcctcgtctaactgtttacggaacatctcgataccagttacaactgtagactgaacatcttctttaacacctaagatctcaagtggatcatttaagtgaagtgttcctctctctactctacctgtagcaactgtaccacgacctgtgattgtgaatacgtcctctactggcattaagaatggtttatctgtatcacgctgtggatctggaatataagaatcaactgtatccattaattccatgattttgtctccccaaggtcccattggatcttcaagagcttttaaagcagatccctggatgattgggcagtcattgaatccgtactcttcgagctgttctgtgatttccatctcaactaactctaataattctggatcgtcaaccatatcacatttgttcatgaatactacgatgtaaggtacacctacctgacgggataataagatgtgctcttttgtctgagccataacaccgtcagtagcagctactacaaggatagctccatccatctgagcagcacctgtgatcatgttcttaacgtagtcagcatgtccaggacagtcaacgtgtgcgtaatgtctcttctctgtctcatactcaacgtgagcagtagaaattgtgataccacgttctctttcttctggagctttatcgatgttagcgaaatctacagctgcgttaccagctactctttcagataaaacttttgtgattgctgctgttaaagttgttttaccatgatctacgtgaccgatggtaccgatattacaatgtggttttgttctttcaaacttagcttttgccattttgaatatcctccttaaattgatgccatattggctataattgttatatttaataactcggctatttatgattatataaaataatcctagctttttcaagttatttttatcatagaatcccctaaaataggggttttctatgatttaatattatttttagattctgttacatgaaaataactgaaatcagctataaaccatgtcttttttcagaatttatttagatttatctgcaagaactttttcctgaacagattttggtactggctcatatttctcgaagaacatagagtagttaccacgtccctgtgtcttagaacgtaagtctgtagagtatccgaacatctcagcaagtggtacatatgctttaaccatcttaccaccaccgatatcttccataccttcgatacgtccacgacgggagttgatatcaccgattacatcacccatgtactcttcaggcattgttacctctaccttcatgataggctcaagtaatactggtgaagctttagccatagcctctttgaatgccatagatccggcaatgtggaatgccatttcagaagagtcgacctcatggtaagatccatcgtatacgttagcgtgtacaccaagtactgggaatccgccaagaatacctgcctgagcagcttcttcgataccttcaccaactgctgggatgtattccttaggaatagcaccaccgacaacggtagattcgaatttgaatgtttcttcgccatttggatccataggctcaaacttaactttacagtgtccgtactgaccacgtccaccggactgttttgcatatttgtattcaacatctacaggttttgtaaatgtctctttgtaagctacctgaggagcacctacgttagcttctactttgaattcacgaagcagacggtcaacgatgatttccagatgtaactcacccataccagcaatgattgtctgaccagtttcctgatctgtatgagcacggaaagtaggatcttcttctgcaagttttgcaagagcttcacccattttaccctgtccagcttttgtcttaggctcgatagcgagctcgataactggttctgggaattccatggactctaagattactggatgctgttcatcacagattgtatcaccagttgttgtaaatttgaaacctacagcagctgcgatatctccggaataaactttctctaattcctgacgtttgttagcgtgcatctgtaagatacgtccaacacgttcttttttatcttttgttgcatttaatacataagaaccggagttcattgtaccagagtaaactctgaagaatgcaagcttacctacgaatgggtcagccatgatcttgaatgctaatgcagcgaaaggttcctcatcagatgaatgtctctctacctcgttaccatctaagtcaacacccttgatagcaggtacgtctaatggagatggcatatattcgatgatcgcatccagaagcttctgaacacctttgtttctataagctgtaccacagcatacaggaacggcacggcactcacatgtagctaatcttaatgcttttttcatctcttccatagaaggttcttcaccctctaagtacatcatcattaaatcgtcatctaattcgcatactttttcgatcaattcagagcggtaaagttcagcttcatcagccatatctccaagatcgtctgttacagtgatatcatcacctttttcatcgttatagatgtatgctttcatctcgaataaatcgatgattcctttgaagtcatcctctttaccgattggtaactggataacgatcgcgtttttacctaaacggttacggatctggtctacacatgcatagaagttcgcacctaagatatccatcttatttacgaatgccattctaggtacattgtaggtatcagcctgacgccatacgttctctgactgaggttcaacaccaccctttgcacagaaaacgccgacagcgccatcaagtacacgaagggaacgctctacctctacagtgaagtctacgtgtccaggggtatcaatgatattgatacgatgctctaaagcacctttctttggttttgtgaactcttccaaagtccagtggcatgtagtagcggctgatgtaattgtgatacctctttcctgctcctgttccatccagtccatggtagcagtaccttcatgagtatcaccaatcttatagttaacaccggtataataaagaatacgctctgttgttgttgttttaccagcatcaatatgagccataataccaatgtttctggttctctctaatggatattctcttccagccaaaggtttttcctccttaatttactacgcagatatgcgcagaacatttttataatacttgagagcaaagttgctttgctcccggtatctattcatatggcaaataatattagaagcggtaatgagcgaatgctttgtttgcttctgccattttgtgcatatcttcttttctcttaacagatgcacctgtattgttagctgcatccatgatttcgtttgcaagtctttcttccatggtcttctcacctctgttacgtgagaaagttgttaaccaacgaagtcctaaagcctgacgacggtctggtctaacttcgattggtacctggtatgttgcaccaccaatacgtctagcctttacttcaagaacaggcataacgttattcatggcttcttcaaatacctcaagagcaggtctttctgttttctcttctactcttgcgaaagctccatatacaattttctgtgctacacctttcttaccatctaacataatgttgttgacaagctttgtaacgactttgttattgtaaattggatctgctaatacgtctcttttctgagtatgtcctttacgtggcacggttcttccctccttaatcataatttactatacaggtcttccctgcatttactgtgtccggtttcccggctctgcaacatttgcaatgaaagttcaatgcaacatgttgtcagtgaacttcatttcgattaattcaacggtactcacatgtgtaaaatgggcaagcccatctcggaacaaaatcttgttcccccttagtgttcgtgcggaaatatatctctagtgaaacaattccaacactaaaccttttagttctgtttgtgatactattggttttacttcattctgtaattaaaaattacttagaagcctttggtctcttagcgccgtatttagaacgagcctgttttctgttagcaacacctgctgtatcaagtgtaccacggatgatgtgatatcttgtacctggtaagtccttaacacgtccaccacggatcataacaacgctatgctcctgtaagttgtgtccttcacctggaatgtagcttgttacttcgattccgttagagagacgaactctggcaatctttctaagagctgagttaggttttttaggagtagctgtcttaacagctgtacaaacacctctcttctgtggagaaggagcatctgtaggtctcttctgtaaagagttgtaacccttctgaagtgcaggtgctgtagacttcttaacagatgtctgacgtccttttcttactaactggttaaatgttggcattattttcacctcctgttaatattatgtgaacaaaaaagttcaaactgcatgcctttttgtgcacgctaaattattatataggtgtccatcccagatgtcaagcacttttacatagatttttcttacgcttttaaagcatttccaatatctggcttttttataccagatattatgattacgaaaaaagaggaacagattttcatccattcctctcttatttcaatatcttattcttctactggtgcaaactcttcatcaataaaggagtcatcatcaaaatcgatctcgtcattttcattgacatctgaatcaagtttgatgttgcggtatctcttcatacctgtaccagccgggatcagtttaccaatgattacgttctctttcataccgatcaatggatcgacttttcctttgattgctgcttctgtcagaacttttgttgtctcctggaaggaagctgcggataagaaggagtttgttgcaagggaagctttggtaataccaagtaatacctgttttccttctgccatttcttttccttcgctctcaagcaattcatttgtatcctcaaaatcaagagtatctactaatgttcccggaagcatatcggaatcaccgtttgtctcaacacggactttctgtaacatctggcgtacgatcaactcgatatgtttatcattgatctcaacaccctgtaaacggtatacacgctgaacttcgcggagcatgtaatcctgaacagcacggacacctttgatttttaagatgtcatgtgggtttacagaaccttctgtcagttcatcaccggcttcaagtactgcgccatccattactttgattctggaaccataaggaattaagtatgccttagattcgcctgtctcattattggtaacgataatctcacgttttttctttgtatctttaatggtagctacgccgccaaactctgtgataattgcaagtcccttaggttttcttgcctcgaaaatttcttcgacacgaggaagaccctgtgtaatatcagtaccggcaacaccacctgtatggaaggtacgcatggtaagctgtgtaccaggctcaccgatggactgagctgcgataataccaacagcctcaccaacctgaactgcctgaccggttgccatgtttgctccataacattttgcacatacacccatatgggagcggcaggataatacggtacggatcttaactttttcaattgggttgccattctcatcaacaccacggctcataacttctgctgcacgttttggtgtgatcatatggtttgcttttacgatgacattgccatctttatcacaaattgtattgcaggagaaacgacctgtaatacgttcctgaagactttcaatctcttcttttccatccatgaatgcagttacccacataccagggatttctctgttcttgccttcacagcagtcagactcacgaacgatcatatgctgtgatacatctacaagacgtcttgtaaggtatccggaatcggctgtacgaagcgctgtatcggacataccttttctagctccatgtgcagacatgaagtactccaatacgtcaagaccgtcacggaagtttgatttgataggcaactcgattgttctaccggttgtatcagccatcaaaccacgcataccagcaagctgtttgatctgtttatcagaaccacgggctccagagtcagccatcatgaagatattgttgtatttatcaaggccttccagaagcacttttgtaagttcatcatcggtctctttccatgtctcaacaacttctttgtaacgttcttcctctgtgataagaccacgtttgtactgttttgtaattctatctactgtatcctgagctgctttgatcatagccggtttctctggtggaaccgtcatatcagaaatggatacggtcatcgctgctcttgtagaatatttgtaacccatagcttttacagcatcaagaacttctgctgtttttgtagcgccatggatgttgattactttttcaagaatctgtttgttctgtttctttgcaacaaggaaatctacttccagttttaactcattgccaggaatgcttctgtcaacaaatcctaaatcctgaggaatgatctcattgaagatgaaacgtcctaatgtggactcaacaactcctgtgtgtgttcttccgtctggcattgtctttgtcatacggactttgattctggagtgaagtgttactgctccattctcgtacgcaaggattgcttcgtttacactcttgaagatcttgccttctcccttagctcccggtctctcctgtgttaagtagtagataccaaggaccatatcctgtgaaggaaccgctacaagaccaccgtctgatggttttaataagttgttcggtgaaagaagcataaatctacattcagcctgagcctctacagataatggaagatgaacagccatctggtcaccatcgaagtcagcgttgaacgctgtacataccaatggatgtaacttgattgctttaccttctactaagattggctcgaatgcctgaatacctaatctgtgcagtgtaggagcacgatttaacataaccggatgctctttgataacgtcttctaagacatcccaaacttctgtctggagtctctcgaccattttcttagcactcttgatgttgtgggcagatccgttggcaacgagttctttcataacgaatggtttgaataattcgattgccatctcttttggaagaccacactgataaatctttaattttggctcaacacagataacggaacgtcctgagtagtcaacacgtttaccaagtaagttctgtctgaaacgtccggatttaccttttaacatatcagataaggattttaatgctctgttaccaggtcctgtaaccggacggccacgacgaccattatcgatcagggcatctactgcttcctgtaacatacgtttctcattacgaacgatgatatcaggagctcctaactcaagaagtcttcttaaacggttatttctgttgataattcttctatataaatcatttaagtcagatgtagcaaaacgtccaccatccaactgaaccataggacgaagatctggtgggataaccggtacaactgtcatgatcatccactctggtttatttccagattcgcggaatgcttctacaacttccagtctcttgatgattctggcacgtttctgacctgttgcatcttctaactctgcttttaattcagcggaatctttttccagatcaattgcctgtaataattcctgaattgcctcagcacccattccaacacggaaagtattgccatactgttctcttgcatcctggtattcaccctcggaaagcacctgtttgtactgtaatgcagtattgcctgcatccaatacgatgtaagaagcaaagtataaaactttttccaatgttcttggagataagtccagaattaatcccatacgggatggaattcccttgaagtaccagatatgggatacaggtgcagcaagctcgatgtgtcccatacgctctctacgaacgctggattttgtaatttcaacgccacaacggtcgcagacaacgcccttgtaacgaattttcttatatttaccgcaatggcactcccagtctttgctaggtccaaaaatcttctcacagaaaagaccatctttttccggtttcaatgttctgtagttgattgtttccggtttcttaacttcaccgcgggaccattctctgatcttttccggggatgctaaaccaatacggatggcatcaaatgaaacagactggttaattgcctctttatttgttgtttctggcatctatgacactccctttctctgctttacagaatcgactctctttaccggtctgtgcctgcagcacagaccgatagacacttattgactattactcttcaaaaccatcttctggcatatcatcgtaaaaatcggagtcgtcatctgcatcagtgtcttcctcttcttctacgtcaacaagttcttcgttttcagaattaaactctttctttgtgaatcccattttggagaatgattcactgtcttcaaaagcaaaatctttatcgcctgaaataatggagttcagatcggtattaccatactcacttgtttccattaattcaacttcatttccttcgtcatctaatactgtcacatcaagtcctaatgactgtaactctttcagtaatactttgaatgattccggaattcccggttcaggaatattatcacctttgatgatcgcttcgtaagtcttaacacgtccaacgacatcatcagacttcacagtaaggatctcctgtaaggtataagctgcaccgtaagcttccagtgcccaaacctccatctcaccaaaacgctgtccaccgaactgcgctttaccaccaagtggctgctgtgtaactaaggagtaaggacctgtagaacgtgcatggatcttatcatctaccaaatgatgcagtttcaggtaatgcatgtgtccgattgttacaggtgaatcgaatggttctcctgtacgtccgtcacgtaactgaactttaccatcacgggaaattggaacgcccttccacagtgctctgtggtctctgttgtcccataagtacttcataacttcttcgccaagtacatctttatattttgcttcgaaatcttcccattcgaagtttacataatcattggctaattccagtgtatcctggatatcaatttcttttgcgccatcaaatactggtgttgcaatgttgaatcctaatgcttttgcagcaagactcaggtggatctcaaggacctgaccgatattcatacgggaaggtacacctaatggattcaatacgatatcaagtggacggccatttggaaggaatggcatatcttctacaggtaatacacgggaaacaacacccttgttaccatgacgaccagccatcttatcaccgacagagatttttctcttctgtgcgatgtagatgcggactgcctggtttactccaggagataattcgtcaccattttctcttgtgaacacttttgcttccacaacgataccatactcaccatgaggaacttttaaggaagtatcacgtacctctcttgccttctcaccgaaaattgcacgaagaagtctctcttctgctgtcagttctgtctctcccttaggagttacttttccgactaagatatcgccggcacgtacctcggcaccaatacggataatacctctttcatcaaggtcttttaacgcatcatcaccaacacctggaacatcacgggtaatttcttccggtcctaatttggtgtcacgtgcttccgcttcatattcttcaatatggatagatgtataaacatcatcctgtacaagtctttcactcaaaagaacagcatcctcgtagttataaccttcccaggtcataaatccgatcaatgggttcttaccaagtccaagttctccgttggaagtggatggtccatctgcaataacttcaccagcttctacgtggtcacccttgaacacgatcggtctctggttgtagcagttagactggttacttcttgagaactttgtaagtttgtatacgtctcttgttccatcatcattttttacaatgatctggttggattcagagctttcaattgtacctgctttcttagcgacaacgcagacacctgagtcaactgctgcttttgtctccatacctgtacctacaacaggagcttctgttgtaagaagcggtactgcctgacgctgcatgttagatcccatcagcgcacggttagcatcatcattctgtaagaatggaattaatgccgtagcgacagagaacaccatcttaggagatacgtccatgtaatcaaacatggttttctcatattcctgtgtctcatccagataacgaccagatactgaattacgaacaaaatgtccttctgcatccagagcttcgttcgcctgtgctacatggtaattatcctcttcatccgctgtcatgtatacaacttcgtctgtaacgcgaggattctttggatctgatttatcaattttacggtatggtgcctcaatgaaaccatactcattaatacgcgcataacttgccagtgagttgatcagaccgatgttaggaccttcaggcgtctcgataggacacatacgtccataatgagaatagtgaacgtctcgaacctcgaatccggcacggtctctggacaaaccgccaggtcccaatgcagataaacgtctcttgtgagtcagctcaccaagagggttgttctgatccatgaactgtgacaactgggaagaaccgaagaattcttttactgccgcagttaccggtttgatgttgatcagactctgtggagaaataccatctaaatcaagtgttgtcattctttcacggacaactctctccaatctggaaagtccgattctgtactggttctgtaataactcaccaaccgcacggatacgtctgtttcctaagtggtcgatatcatcatcatgaccaataccatactctaaatgcatattgtagttgatggatgcgaagatatcatcttttgtaatatgctttggaatcagatcatgtacatttttcttaatagcctctttcagatcttccacatctggattttcttccattaactgtgcaagaactggatagtaaactaattccgtgataccaagttcctttggatcacaatcaacataatgtcttaaatctaccatcatggaagaaagaacttttacatttcttgtctcagtctggatccatacatatggaacggctgcattctggatatcatcagcgatagaacgcgttacttctgtacctgcctctgcgatgatctcaccagttgtcatatcaactacatcctcagcaaggacatgtccgttgatacggttctttaatgctaacttcttattgaacttataacgtccaacctttgcaagatcatatcttctcgggtcaaagaacatagcattaataaggctctccgcactttcgactgaaagcggctcgcctggtctgattttcttatataattcaagaagtccttcttcgtaatttgtagcaacatccttgccaaaacttgcaacgatcttaggttcctcaccgaataaatcaatgatttcctgattgcttccaacaccaagtgcacgaattaatacagtgatcggcacttttctggttctatctacacgaacgtaaaatacgtcattggagtctgtttcgtactctaaccaggcaccgcggtttggaattacagtacaagaatacaattgtttacccactttatcgtgagcgataccataatagataccaggggaacgaaccagctggctgacaattactcgctctgcaccgttgatcacgaaagttccagtttcagtcatcaaaggaaggtcgcccatgaaaatctcatgctcgttgatttcatcagtttctttgttgtgaagtcttacctttacctttaaaggtgctgcatatgttgcgtctctttctttgcactcagggattgtatactttacatcatcttcgcataatgtaaaatctacaaattccagactcagatgaccgctgtagtccgcaatcggagagatatcgtcgaaaacttcttttaagccttcgtccaaaaaccacttataggagtctttctgaacttctataaggtttggcatttccaatacctctttctgtcttgagtaactcatacgcatgccttttccggctttcaccggacgtattctgtttttctccattgacgtttcacctctcgtttttattctcaacaaacaaattgcctgttgtattgcatctaccgcctgtatatgcggtatgtgaacactcacatcttacggctttaagcctactgcaccacaatagtgcaacgtatattatatatcaagtcaagcaaaatcgtcaagttaattttgattttttctaataaatttattagtatttataaaaaagaagaaacagatacatatttgtagtattttttgcatctgtttcttctatatatagtacattctgttttcttttgtgttctatggaaccattatgatctctgccgcttattcgcactggaatcctgcaacttcattctttaaggattctgcgatattcatattcttctcaacagattcgttgattcctgtcatatgacctgccagttccgatgtgtactcggctgcgttggatacacctgttgcactctggtttacggcatttgatacaccgtctgccgcttccgaaatctcgtttgccgcccggcggagattctctgctacattctgaagttcctgcatcatctcattcatctgtgtagcgtcgtcattgtatgtctcaccagattctaccattcctttgtagtcttcaagtacatccttatttacaaaatcgagcatcttgcctgcatttcctgcaagattttctactgattctgttaccatcttactgatatcctgaatgccatttgcagtattacggctttcgtctgcaagttttcggatctcatctgcaacaaccgcaaaaccttttccggcttctccggctctcgccgcctcgatagaagcgtttaatgcgagcagatttgtctgagaagaaatagaaagtatctcatttgtcagttcgttgatcttctctacctgtttgctctgctcgattgctgtggaaagttcttctgaaatccgtactaccatgtcatttgcagatttctggctttctgtcgcatctgttttcatgttctctgctttctgacggatattatcgacacgctctaatccttcgcctgtcttatctgccataaccgtaatgtcacttcggatactctcaatattctctgtgatattcacaacagtcgcagatacttcctgcatgcttgcagcaagctgttccatagttgctgatgtatctgtgatcttatcaccagccgcacggacaccattgtcaacactgattgctgtgtgctccagttctccggaaccatttttgatcttctcgatcagatttctcaatacatctataaactggttaaatccacgaaccatctgtccgatctcatcattgcctctgaccttcagatgtgcagtaagattaccacttcccccatcgatctcagtgatcatcttcatgagatctctggttgctgcgcgcattggtttcacaacgccgatcagaataacaagaattcctgccagtccaacaagaatagatactgcagccattccaacgcacaccttggaaactgcctgataggtagcatgtgactgggctgttgcctcatccatttcattcacgctcttctgctggattccggtaatataagcattcacctcttccatgcagacacggatcacattgacttcgatggaaacttttccgctctttccatcgtcgtatttttccatggcattgtccatacgttccagaacgttgttcacaccatcatagattttctgcataatctgcttctgtccgtcaccctctgtggcatcatacatctgctgcacaagatcagccacagcctcccggtccgctgcataatcatttctggcttctgtatggcttgtctcaccttttgttgtcgcaagataacgatagaaatccttctgcactgcttcaagactatactgtatgttgtaagcattctgcagatccggcactttgctgtctgtgacatctttgatcgaatggttcatcttcaccattgcatcatagttaatcacatttgataccatggtcacagctaccatcagtacaagaattgctaccagtttcactgccatgctgctgtttctggttttcttcgcagttgtcttcttaactgccacattattatctctctttaccgcacgctgtttcttctgctttggtgctttgttctttttttcattgccctgcatcattttcttcatgtgaatcgcgccttttctatcttcataatatcattattttacattctttttacggcgaaagcaatggttattaggtatttttaccagaaaatgtcaaaaaagaacattttttgcatataatgtgcaaaaaagagccatggtatatacataccatgactccttaacagctaattttcttctataaataatgaaattatttaagagtaactttagcgccttcagcttcaagtttagctttgatatcatcagctgtagctttgtcagcagcttctttaagaactttaggagctccatcaactaaatctttagcttcttttaatcctaatcctgttgcttcacgaacaactttgataactttaactttgtttggtccaacttctgttaactctacgtcgaactctgttttctcttcagctgctgctgcttctccgcctgctgctgctactacaacgcctgctgctgcagatacgccgaactcttcttcacaagcttttactaaatcatttaattctaatacgcttaactctttgatagcttcaataaattctgctgttgttaattttgccattttaatttcctccattaaaatttaattattatgtggcttccgccatattgtttctgatcattcccgatcaatcacctgctaatctgcaggctttcattgttctgctgattaagcctcagctggagcttctgctgcttcttctgctggagcagcttctgcagctactgcaccaccgttctctgcgatctggttaagaacacgagcaaggttggtgataggagactgtaagcttccaagtaatttggaaagaagttcttctcttgatggtacgcttgcgatagctttcataccatttgcatcgtagaaagttccttctacaacaccggctttgatctcaagagctggagctgtctttgcaaattttgctaagattcttgctggagctgttgcatcgtctttagaaatagcgaatgcgcttggtccttcaagagactcttttaagctttcgaattcagttcctgcaatagcacggttaactaatgtgttcttataaactttgtaagaaacaccagcttctcttaatgctttacgtaactgagtatcttctgcaacagtaagtccacggtagtcaacaactactactgactgtgcatctttgatgttttcagaaatttcctgtacgataggctgtttaagttctacttttgccacgaatcgtgcacctccttttattattttgcgcagtggcaagttccactgcatgactgcataaaagacgttgaggtttatcactaaaaaacctctctgtcaaagacagagaggtatcaaatcataaatgatccttctatagatgaaaccatctataaaatctcctcggtaggtctgatgttacgcctgataggcacctactgtcttcggcaatatgcaaggcattactttcgcaacaccttgtgcattatagcattgtatattggggttgtcaacaaaaattaaaataattttgattactgtgcaatcttaactacgtttaattttacaccaggtcccattgtagaagtgattgttgcactcttaatgtactgaccttttaagcttgaaggcttagctttgttgatagctcccataagggtctggaagttgtcgcttaactgttcttctgtaaaagaagcttttccaactggcacgtggataatgtttgttttgtccaatctgtattcaatcttaccagctttgatgtcgttaacagcttttgtaacgtccatagtaactgttccagcttttgggtttggcattaaacctttaggtcctaatacacgtcctaaacgtccaacaacacccatcatatcaggtgtagcaacaacaacgtcgaaatctaaccatccttcgttctggatctttggaattaattcctctccaccaacgaagtcagctcctgctgcctgtgcttcatctaattttgtaccttttgcgaatactaaaactttaacagtttttcctgttccgtgtggtaatacaaccgcaccacggatctgctgttctgcatgacgtccatcacaacctgttctgatgtgaagttcgattgtctcatcaaatttagctgtcgcgtttttctttactaagctgattgcttcagcaacatcgtactgagctgctttgtcgaaattcttaacagcgtcctgatatttctttcctcttttcattctaaaaaacctcctggtggtattatcgggagaggtccctcccacataatcgttcatagtgactatctgccggtgtggttaaaccgtccggcttgtactgtaaaatcttattcttctacagtaacacccatacttcttgcagttcctgcgatcatgctcatagctgcctcaagagatgctgcatttaagtctggcatttttaattctgcgatttcctgtaattttgctttggaaagtgtagcaacttttgtcttgttcggtgtagcagaaccagatttgatgttgcaggctttcttaattaatacaggagcaggtggtgtctttgttacgaagctgaagcttctgtctgcgtatactgtaataactacagggataattaagtcgccctgatcggctgttctagcgttgaactgttttgtaaattctacaatgttaacgccgtgctgtccaagtgcaggtccaactggaggagcaggtgtagccttgcccgcaggaatctgcaatttgatgtatccttctactttctttgccattggaaaattgcctccttaataaattttgaacttgtgatacaagtctgcttatttcataagcttaacatctgcgaaacttatttctactggtgtttcgcgaccaaaaagttccacattgatagtaacgatctgcttgctgtggttcatggactggatcacaccaacagtatctttccagacaccgccgataacagtcactgtgtcaccctctgcaaaatcaacctcaacgttctcagtcttgatacctaatggtttcatttccatatcggtaagcggtaccggcttgcttcccggaccaacgaatccggtaacaccacgggtatttctgacaacataccaggtgtcatcattcataaccatattgataagtacgtatcccggaaacatcttctttgatacggttttatttgcgccatttttcaactcaacaacgtcctgcatcggaacacggacctctaagatctggtcttccagatgtcggttttcgattgtcttgtcgatattggcttttaccttattctcatatcctgagtaggtatgaactacataccagtgtgcttctgccataattacctctgcctccaattaaaaacttaaacctacaaggaaatcaacgccatactgaatcagaaaatccagaagagcgatgacaagacctaaaacaacagacgtagcaacaacggctcctgtctgtcttgcaagtgattgtttgtctggccaaataatcttactaaattcagccttgagaccggtaaaccagctcgacagtcttgccagcaggctcatgcgctgaccattttctggagcttttactaatttctcggtttctcccattttctcactccttcacccagctaaactatttggtttccttgtgtaatgtatgagtcttacagaatctacaatactttttggtttccattctgtctggatgagctttcttgtcttttgtcgtgttgtaattacgattcttgcattctgtacatgccagtgttattttcgtgcgcacaacttccacctccattaaattctttgtgtttttctacaccttttagtcgaaaataagtccgacctaaaaaaaggcataaaaaaaagacctacttccatcgctagactaatatagcacacagaatattggtcgtcaacaaattttttgattttttcttgcttttttccattttctacaagataatatgaaaaaaagataaatatttcttatagaactaccgatatattatttgtaatctaatgaaacggattttcatccccgcataacgagttgtttcttattatataatatctgttttaaatcagaaacattccgttatgatttcaaggaagaaaggaggggaatatctatggcagccattgacagtgcctaccagtactatctgagtacttatggcaattcgactgtatcgcgctatgacacgcacaagaaaagccagctgcgtgacacctataataagattgtaaaaaccaataaagaatcccctctgtataagatcaagaacctcggggaagcgaaaaaatatgcaattgacatcaaggaaagtgtcggagacatccagcacatcgccgcttcactgtccgacaatgaacagggcattgaaaaagcattttccaaaaagattgcccaatcgtccgatgaggatgtggtaagtgcagaatacatcggaaccgacaacgatccgggtaccgcttctttccatatagcagtaaaacagcttgcaaaagaacagatcaaccgcggcaattatctccagccggaccggtatcagtttacgcccggtctttactctttcgacctgaacacgaacacaaactcttacgagttccagttttctgtagataagagagattccaacgctgacgtccagcaaaagctgatgcagcttatcaaccattcgaagatcggcatcacagcaacactggatcagaatgaaaaaggagataccgcacttgtgctctcctcgaaccagaccggaattgcagacgacgaagagtatctattccagattttaccggacgccagttcttcctccatgcatgctatgaagctattgggcattaaccagattgcgcaggaagccggaaattcttcttttgttttaaatggaaaagagcactcctcttactccaattcattcacagtcaacaatcagtttgacctgacattgaacggagtcagcaaagccggcactgaggcaaccattgattttaagacagacgccgacgcagtagctgacaatgtcagcaagcttgccaacgcatataatgaagtaattaaaatcgggcatttgtattccggtacccagcgttctaacaagctcatctctgatatgagcagtgttgcaaaggattaccgcaacgaattagaggctatgggattggaactggatacagataattatctgcacatagaccgcaatctgctctacgatgcagcaactgcggaggatgcaccgcagaacttctccgttttgaataagttcaaagacaccttaaacagcaaggcatccgaggccgctatcaatccaatgaattatgtaaacaaggtaatcgttgcctataaaaatccggggcataactttgcaaccccttatatcacttccatttattccggaatgatgttagaccgctactgttaaaaagactgttacacgcattggtgcgagtagtgatacagcattttttgaaaaccatcgtagtacaatttgtttttgaggtcatcggatagcaacttgcttgtatcgcaccccgatgggtagctgtgtttgaaatccagttgccttttatataccacacaacctaaaaattatcaagtacgcgcagcgttcacttctcccatcaccgggagcaaatggacgctgctttttttgtttgcaacgaaaggaggcatccgtgaaatggcagtttttcgggtagaaaagaacagcggctacacggtcatgtcaaaccaccacctgcggaaccgggccttgtccctgaaagccaagggcttactctcccaaatgctctccctgccggaagattgggattacaccctgcaagggctggcccgtatcaaccgggaaagcatcgacgcgatacggcaggccatccgggaactggaacaggcgggctacatccagcgttccagagaacgggacgagaaagggcggctgcgcggcgcagactatgtgatcttcgagctgccgcagcctgttcctgcatcggtttcacctacattggaaaatccaacgttggagaagcccacgcaggaaaaccctacgttggaaaatccaatgcaattaaataaagataaactaattacagaaaaacaaaagaaagagggattaaat

SEQ ID NO: 14295 - DNA, 112385 bp, Unknown
  gut microbiota DNA sequence
tgccctgtatcaggcagtcattgagttcattaatgaaggctgtgatatcaacactttaaaagtagctgatatcacaggctgggcaggcattggaaaaggaacggcatacgaatatttttcttcaaaggaagagataatctcttctgcaattttatattatgtgaaagtgtgcgttgaaaaactgcaggtaatttctacagataacagaacgtttcaacagaaaattaacgaggtcatggattttattgatgagcatgtaaaagaaaagcagggtgtctttttcctgataaaaatggtattggaatcatacgagataccaaagaatctgaaagatgagtatgagcgtatgaaacaccagtgctgtgataaggagaaaaacgagattatcgactgcattgtggaggagggtgtccgcgaaggtctgatccgggaggagaatgttttcctgcgaagagccgcggtcgaaacccagctttcggtctattttatgtaccgcatcgcagcagagaaaaaaatggagcttgacctggaggcagattctttgagagaatatatctatcagaatatattgaaattattaggatagaaagaaggaagttttatgttgacactattatttgttgtgctgctgttgactattttcggcaaactgttaatctttgcgattaaggcagcatggggaatcacaaagattctgctgaacattgtattgctgccactcatcattattggaatgtttgcaggtggtcttacatatctggcactgatcgtgcttgcaatcgtgggattggtttcattgattaaggggcataattaaaacaaagagttaatgcacagttgctattttttttgatatgtgtcatactgtacaaagaagtagcgacgcatacgacgcaagtgcgaggtgagattatgattaatagggatttatatctgcaaaaattaattcataatatgtggaatggtgaaattaaggttattactggtatccgcagatgtggaaaatctgtacttctatttgatttgttctataactatctcttggaaaatgggacgaagaatgagaatatcataaaaatggagcttgatcaaagacggtattataagtacagaaatccaataacactttgtgaatatgtggaatctattgtacttgataacacaaatgaaaaattttatctttttgttgatgaagttcagcttacaaccaaggtgacggatcatgagaatggtaatattgatgttaccatttatgatatgctgaatgaactgaaatcatacaaaaaccttgatgtatatgttactggcagtaactctaaaggactgtccaatgatatcgctacagaatttcgtgggagagcaacccagattcatgtattcccaatgtcttttcaggaatattactcatttgttggtggagatgaaagaaaagctttggataactatatgctatatggtggtatgccaaaagttttgactattactgatgaagtagaaaagaagggatatttgacatcgttatacagtgaactttatgtcaaagatattattgagagaaacagaatagaacgtgaagatattttaaatgatattttgaattttcttgcatctcagattggttcacttacaaatcctacgaatattgccaattctataacaagtataaagaatgaaaaaataacagcatcaatggtatcaaattatgtaaaatacattatagattcattccttatttctgaggcaaagaggtttgatgttaagggcaagacatatttcaaatatccatacaaatattactatacggacataggacttagaaatgcacgtcttaactttaggcaatatgatcccggtcatattatggaaaatattatatacaatgacttattgagacgtggatatagtgttgatgtaggggttatatcggatcgtacaggaggaaaaaatctacagagagaaattgactttgttgtaaatcaggcagataagaaaatatacattcaatcggcattccgcatggacgacgagaggaaagaaacatcggaacttgcatcgttgatgcttacgaaagatttctttaaaaaagtagttgttagaatggatatatcacacaattattatgatgatgacggtatttttcattgcaatctgattgatttcttattaggtaaagtagaattgttctaaaagttagcatagaaatggtatattaggatattatcatgttactgttcactcagcacctgaacaccatgctgttcaggtgcgtatgaacgtgatgtgggtgtgagcagcccccttttgcgaagcaaaactttatatggggctgcgaagttacagttcgcagggtaacctgtgaactgtaacattatcataaatggttcaaaaaaatgtaaataaaaatcagttgacaaataccgcaatagattttatcatgaaaaaagatataaaaaggtgatgagaaagaggagtacacacagacaactgaaagagaatgacattcaccggctgagagatgtcaccagaacatgttgtgtggaaggtagcttttgaaccgtcgcgccgaacctgtctgttgtatatgagcaggagaacttgtatacggatcatgcggaggagaattttcgtatatcgaagaacagtcagaagtaagcgagaacgatttgtccccgttaccggacagtgatttctttttcaatggataatggaattgaaaaatcgaatcagcagagatatgttgtttttacaacataacaaaggtggtaccgcgttgacacgccctttgcatccgtatggatgtgaagggcttttttatttcgcataaaacagtacccaaagaatgttttacaagtattaattagttaggtaatttcgaaactcgtagaaaatatgaattgagttgtggaaatgtaacgaaagcttgagaagacactggggagccgccggttcttgcttggcagtcatagcgttagctgtggctggcatgctagcaccgttgcgagcgacacgtagcggaagcgtgtcttcgaaaattttgttgcattttcacaacgttcgtaatgtaaattcgagtttcgcaatgccgaggcaaaaagaaaggaaaaagacaaatgaaggaattagcaaaaacctatgacccgaagggcattgaagatcgcctctataagaaatgggaagataacggttacttccatgcagaagcagaccgcagtaagaaaccatttaccattgtgatgcctccaccaaatattacaggacagcttcacatgggacatgcattagacaataccatgcaggatattctgatccgatacaagagaatgcagggatacaatgcattatggcagcctggaacagaccatgcttcgatcgcaaccgaagtaaaagtgatccagtctttaaaagaaaaaggaattgacaaagcagatctcggaagagagggttttttagagaaatgctgggaatggagagaggaatacggaagccgtatcatcaatcagttaaagaaactgggttcttctgcagactggcagagagaacgttttaccatggataagggctgctccgatgcggttcaggaagttttcatcaaattatatgaaaaaggttacatctacaaaggctcccgtatcgtaaactggtgcccggtctgcaagacctccatttccgatgcagaggtagagcatgaagagcaggatggattcttctggcatatcaactatccggttgttggcgaggaaggaagattcgttgagatcgcaacaacaagaccggagacattattcggagataccgcagttgctgtcaatccggatgatgagagatacaaagacatcgttggaaaaatgttaaagcttccaatgacagaccgtgagatcccggtcattgcagatccgtatgtagataaagaatttggaaccggatgcgtaaaaatcacaccggcacatgacccgaacgactttgaagttggaaaacgtcataacttggaagagatcgttgtcatcaatgatgatgcaaccatgaacaaattagcaggaaaatacgaaggcatggatcgctatgagtgcagaaaagcactggtagaggatttagagaaggccggacttttagtaaaagttgttcctcattcccacaatgtaggtacacatgaccgctgtggcacaacggttgagccaatgatcaaacagcagtggttcgttaagatggatgagatgatcaaaccggccgttgaaggcgttaagaacggagagatccagttacttccaaaacgtatggagaaaacatacttcaactggacagataacatccgtgactggtgtatttccagacagttatggtggggacacagaatcccggcatactactgtgatgagtgtggtgagatggttgtttccaaagaagcacctcatacatgcccgaaatgtggatgcactcatatgactcaggatccagatacattagatacatggttctcctctgcattatggccattctccacactcggctggccggaaaaaacagaagatttagattacttctatccgaatgacgttttagtaaccggatatgatatcattttcttctgggtaatccgtatgatcttctcaggttatgagcagatgggcaaagcaccattccacgcggtattattccacggactggttcgtgattcccagggacgcaagatgagtaaatctctcggaaatggtatcgacccattagaggtgatcgacaaatacggcgcagatgcactccgtctgacactgatcacaggtaatgcaccgggtaacgatatgcgtttctactgggagagagtagagtcctccagaaactttgcaaataaagtatggaatgcttcccgtttcatcatgatgaacttggaaggcgcagaaatcaaaacaccggaactttccgagttaaaagcagcagataaatggatcttatccagagttaatacgctcgcaaaagatgtgacagagaacatggacaaattcgagatgggtatcgcagtccagaaagtatatgactttatctgggatgaattctgtgactggtatatcgagatcacaaaagtccgtacctataataaagagaatgatccggcttctgcaaatgcagcattctggacattaaagactgtattaacagaggcattgaagttgttacatccattcatgccattcatcacagaggagattttctgcacacttcatccggaagaagataccgttatgcttgcaaaatggccggaatacaaagaagaatggaactttgcagcagaggaagaaatggttgagcattgcaaggatcttgtaaaaggtgtccgtaacctccgcacagagatggatgttccaccatcaagaaaagcaaaaatctttatcgtatcagaagatgcaaagatcagagatacctttgaggtaaacaaagaagtttatgtaaacctcgcaggtgcaagtgagatcgcggtacaggcagacaagacaggaattgaggaagacgcagtttccgttgtgattcctggcgcaacactctaccttccattagaagaccttgtagacttcgagaaagagaaagaacgtctgttgaaagaacaggctcgcctcgaaaaagagcttgcgcgttccaaaggaatgctctcaaatgagaagttcttaagcaaagcgccggaagcaaaagttcaggaagaaaaagagaagcttgcaggctatgagcagatgatggctcaggtcaaagagcgtcttgcacagatgaaataaaaatcaaataactatttttaatagccgtcgacttttgcagggtcaggacggctattttttaatggtataactcaaaatagtaactaaaaactcgctgaaacacgatgcttcagcgagtttttttcttagaaatattgtcagcgctgcgaaaaatactttggctaatatgcacaaaaaccaggttgaaaatattcgaaaaaagagaaaacttgcttgaaaaaaagaccggaaacgagtatgatatagtatatatacgatttttgtaggaagaagggagttggaagaatggcattaccaagtatctctacaccaaaagtgaggaccgtgaataaagacttagaggcatggatcagactccctgcactggaagaaggagaacactatacgatcgagtatctgcatgatgtattacgggtgaaccagattacttatggaatcgatgaagcgcagcttcagaagattctcgatgaagaaatctatgaacaggacgtactggtggcaagaggcataccggcagtagagggacaggatggattctatgagtataaggtgaatatgaacattgagaaaaagccgaagatactgccggacggatccgtagattactggtctatgtacagtgtgcagtcagttcagaaggatcaggtcattgcgatatatcatccggctgtaaagggaacagatggaaccggagtttccggaaaaccgattgccgcaagggtagccagagagcagggcgcacttcggggaaccggttttggacgaagtgaggattgccttacctatttttccctgatggatgggaagattgatattgagaatgataagatcagaatccagccaatctatgaggtgagcggagatgcgaatcttactactggaaacatagattttacaggggatattgtgatccacggcagtgtggaatccggagttacgatcaaggcaaccggaagtatcacaattgatggaaacgtggaagcctgtaatctggaagccggtaaggatatcattttaagaagtggaatggttggagggaacaaggcacatgtcagaaccaaaggaaatctgtatgcaaagtttattgagtatacagtcatccaggtagagggagatatggaggctgacgtattgctcgactgcacagttgcgtgcagaggatctattctgatccagggcagaacagcaaagatcatcggtggagatgtcagcgcagtcaagggaatcagggctaccacgattggaaatgaagcggagatgcggacagctgtctctgttggggtaggcacggattgcatagcaaggctgaaccttctgaagaagaagttagaaataaccaaaatggaaattgacaagatcgaacagggacttgccaagtttgaagagatggagaaggagcgtggtgtcagctatcgggaagatccacgaagagtggcacttctgcgtaccagaatccagaatatggcgacactcgcaggagacgagggcgaagtgaagcggcttgagcatatgatctcagatggagcaaatgcaacggtctgtgtgacaagagacgtattcccgggagtatccatagcgatcagggatcaggttttaaatgtaaagaacaatgcaaaatgcgtagagttttatcatctgaatggaaaaatctgtacaagaacagctgaggattaacagacaataacaggcagaaggtcctaaaaaataagatagcatttcaggagaaacgggttgaaaccgtaaatttcctgaaatgctatttttatattttatattattgacgaaaaattactttattttcatggaaattttataatttgacattgaaagtaaaatcttcctatattataatcaatcaatgagaaagaaatgatcagccagtctgcagttaagcatgcacaggcggatcaggagagaaatgatcagtcagtacaggaaaggtacggaaattaatatgataaattttgaagaagaattgaaaaactttaaaccaagtctggaagtggaagaggcagagcaggcgatctataatcatgagctgacagatatgacggatgttatgcaggaaatgctgcaggaattaaaacagcagaacagatagagaggtttttcatgagatgctataattgtggagcagagcttggcaaaggagatgcctgccagaactgcggaacgaatgtaaaagtatacaaaaagattttaatggcatccaatgcctattataatgatgcattggagaaagccagtgtcagggatctgtcaggggcaattgagagcctgaagatcagtctgcgtttttataaattaaatattgatgcaagaaacttattaggacttgtctattatgagatgggagaggtcgtgactgccctcacggagtgggtgatcagcaagaactatcagccaaaggacaatctcgcaagccggtatttagatgaagtgcagaagaaccaggcaagacttgattctgtcaaccagacgatcaagaaatacaatcaggcattgctttactgcaagcagaacagccgtgatctcgcaattatccagctgaaaaaggtattgtcgctaaatccaaagttagtgagcggacatcagcttctggcgcttttatatattcaggagggacgttatgatctcgcaaagaagtcattgcggaatgccggtaaaatcgatgccaataacactttgacactgcgttatctgaaagaagccaacaccgctttaagagagcagaatccgagcaggaagcagaagaatgatgaactcatttcctatcagagtggcaatgagacgatcatccagccaaaatatctgaaagataattcggcagttggtacgatcattaacatggtcatcggaatcgcaattggaattgcaatcaccagtttccttgtggttcccggtgtgcggagaaccgtgatgaacaatacgaaagcggaagtgctggatgcaaataatacgatttcttccaaaaatcagacgatcacaagcctgcagagccaggtggatgaacttaccagccagatcacggatgcgaagaacagcgaggaggaatctgccagcaagctggaaagctatgacaagcttctgactgcatatgagacatacaccacaggagacattgagaaggcaggggatgcgcttggcagtgtcaatgtggatgatctgagtgcggacgcaaagagtatttatgataccatcaatgcacaggtgaattccgaatacatggctgcattatataaggaaggttatgatgcatattccggcaaaaagtatgatgatgccgtgagtgcattttccaaagtcgtcgagatggatgaaaactatgagaatggaaatgcactgtactatcttgcacaggcataccgcaagaacgaggatatggaaaatgccaaaatctattatcagaaagtggtagaattgtatccaaatacagagcgcgctgcaaactcacagaactatctggatcagagtgagacagacaccgcccattaataaaaagacaaactgatattaaaaagtacgaaggagatcaaaccggaaattccggggagactccttctttttttgcaaattataagcagaatggagagagaggaacaggagcatgaagagccagtatattatggaaaaaggatgtttagttgtctatgtgccgcgcgagctggatcatcatcaggcaaacagcatccgcacagagacagatcttctgatcgacacctaccatgtcagacatctcgtgtttgattttacggagacagagtttatggacagttccgggatcggggtgatcatcgggcggtgtaaaaacctcggctattcaggcggggatgtaagtgcgtgtcatctgaacgagcgtgtggacaagatatttaccgtatccggactgaaaaaaatcattcgggtaaaagaataaaaaataatgtggaggaagtgaaaatgagcagtcagaatgagatgaaactgatatttgatgccaggtcggtgaatgaaagttttgccagagtggcggttgcggcatttattgcagaattaaatcctacacttgatgagattgcagacattaagacagcagtgtcagaggcagtgacgaatgcgatcattcatggttaccatgagccggaacagaaagtggaacttctgtgccagatccagggggacgaggtgtccatcaccgtttcggataccggcgcaggaattgcggatgtgtcaaaagcgatggagcctttttatacgacaaaaccggaacttgagcgctctggaatgggtttctcttttatggaagcatttatggacaggcttgaggtcgtgtccgagccgggaaaagggacgagcgtacatatggtaagaaaactgggaaatcaggaaggttagcctatggtgcggcaggcggaactgatcagacaggcacaggatggggataaaaaagccagggacaaagtcgtttcagataaccttggattggtgcacgcaattgtccgcagatttgaaaaaagagggcatgacagggaggaactatttcagatcggatgtattggtctgatcaaagcaatcgatcattttgatctgtcgttaaatcttgcattttccacttatgcagtgcctatgatcacaggggagatacggcgtttcctgcgtgacgatggcatggtgaaagtgagccggagtttaaaagaaaatggatacaaaatcagcagggcaaaagaagttctcacaacagagctggggagagagccgagtcttttggagctgtctgccatgacggaacttggcacagaggagatcgtgatggcattggacgctaaccgtggggtggagtccatttaccagccggtctgcggctcagacggagatgagcttttactcattgaccagattggagatcagagcgatgtctatgaggagccggagaaggaggctgttttaaacaaaatggtggtcagacagctgatggatacactcgatgagacagaacagcagatcatccggctgcggtattttgaaaataagacgcagtgcgaggtggcaggaatacttgcagtgacacaggtgcagatcagccggaatgagcggaaaatccttgcaaaactccgggcaaaactggagtcataacgtcatttgcagatagaaaatcttgaagagcgaaaacatcagtgatatagtgaaaggaatggtacatatgacagagtggatcgaacttacaaagcaggaggaaaaataacgtgaaagcttacgataattatatttttgatttatatggaacgctggttgatatccataccgaggagaatgatcctctggtatggaaaaagctggcgcttttttatggctattatgacgccgattattcatcggaagaattaaaagaaagatatgctgcaatcattgcaggcgaggagtctaagatgaaatctgagaaaaaagatgatgctcatgaggcacatccggaagttcagattgaggaggtctttcagaagctttttgaggaaaaaggtgtggaggcagatcttacacttgccgttcatgcaggtcagttcttccgcatcctgtctacggattatataaaactctatgacggagtgaaagatttgttagaagcattaaaaaagaagggcaaaaagatttatctgctttcaaacgcacagcgcatttttacagagtatgagatgcacacacttggaatcgcaaagtactttgacgatatttttatctcttcaacctgcggggcgaaaaaaccggacagcagatttttccaactgttgattgataaatataatcttgatataacaaaaagcattatgatcggcaatgatgctgtgagcgatattgccggagcgaaaagtgttgggcttgacactttttatattcattcgaatatttctccaaagctgccggaagagacatatctagcagcagatggatcagaaaaaacaggaaaaatcatgccggatgcagactttatgttagatggaatggacatggagagagtcagggagatgctgctataattttatgacttagagtattgaattaagatgcccttggaaatcaggtctgcatttgtttcttcggagatatgggaatctgtaattaccattttgactttatcttttagattaagtggaacaactccaatctttttgaacttttcactttcggtaagaacaatgacctgtgaagattgtaccgccatatcacgaacagcctgtgcacgcatttgatctctgtttgtaaagccaatctgactggaatatccgtctgttccaataaaaaaattctccacaaagaaattttctgccccttgtcttaccatgggaccgaccataacctgtgaatcctgctgatagattccgcctaaaagaaaaatctgaaaattacttttgccgcggatatatgaggcgataaatgcactgtttgtaatgatggtcagatcttttttggttcttgacaattcatccgctaacagggcacaacaactgccactttcgatcataatggtgtccccatcttttacaagctctgccgcggccttggcgatctgccttttttcctcgtaatgataggcgattctgccgttgatatcatcggtacttcgaaggagtgcaaaaccatgctctcgtttaataattccctgagattctaaagcgtcaagatcttttcggatggtaacctgcgatacacctaaagtttctgaaagaaaggttacttcaaccttattctgttcactcaacaattctaaaattttattttttcgttccttcatggttgtgataccttgcctttatgtctattttatttcatatcatagcatttctgatttcttttatcaatcatagaatttcaaatgaaagtacttgttttaacaaaatgcctgaataccatttttgttcataagttctaaatactctgccagatcctctgggtgcagagagtcacgtccttcataatcgtactctttatcaagaagatggtatttattttcaccaaactgatgaaaaggaagaagctgacagtgatcaattccaatttccttcaatagatcggagaatgcttttgcatcatccaaagaatcgttgaaatctgggataatcggaattcttggaagaatttcttttccggctttcacagcagctttcatattgaaaagaatctgttcatttgatacgcctgttccatctttgtgtttcactggattccagtgcttcaaatcaaaaagaatcatatcgacattttcgatgacagatagaaacgtatccaggggcgcatatccagtcgtttcacagcaggtgtgaagatgatttgctttcgcagcaatcagaaggcctctggcaagttccggctgagagagaatctctccaccagaaagagtaatgccaccgccactttctttatagaatacttcatcctgcatgacgacatccataatttctttgactgtttttttgatccccttcacttcgtcccccattttctgaggcgtaggagcctgactttcggggtttgagcaccacttgcagcgcagaggacagcctttgaagaatacaacggttcgaataccgggaccatcgttgacactgaatttttggatattaaagatcgtaccactggttgataaaatattatgatccatgagaatcctccttgttatttatgaacatttgtaactatttagcagcttcacagttacggatatttttcaattgttttcctatgacatcatagcatagattgtttgatttgaaaagaaaataattacgaatgaaaataaaaatgattttatgtgaaataaattcttgacaaatactgaaaatacaactatagttaagttacgaacgaaacacatagcatttcaaacgaaaataaatcgatgcaataagggaggctgattcatggagaacataaaacattttggaacacttaccaacagaatgaagaagtttcgagaggaagtattagaagaaaagccctatattgatgcagagcgcgctgtacttgctacggaggcttataaggaaaaccagaatcaaccaagagttatggttcgcgcaagaatgttggagaagatacttcagaatatgacgatttacatggaagaaaaatcgctgatcgcaggaaatcaggctacgaagaattgtaatgcgccggtttttccggaatacacgctggaatttgttatgaatgaattggatttattcgagaaaagagacggcgatgtattctatattacagaagaaacaaaacaggcactccgagagatcgctccattttgggaaaacaataacttaagggcaaggggagaagcacttcttccggaagaagtaaatgtatttatggaaaccggcgtctttggtatggaaggaaagctcaatgcaggagatgcccatctggcagttaactacgagagagttcttaaggaaggcttaaaggggtatcgtgagagagtcacaaagttgaaatctgagcttgattttacagatccggaaagcattgacaaaaatatgttttataaggcggttttgatcgtcattgatgcggtatgcggatttgctaatcgttatagcaaattgacctctgagcttgcaaaaaaagaaagcaatccagtaagaaaagcagagcttttagaaattagcagaatctgtgcaaaggttccttatgaaccagcagagaatttcaaagaggcagttcagtctgtatggtttatccaattgatcttgcagattgagtcaaatggacattccttaagctacggaagatttgatcaatatatgtatccttattacatctcagatcttacaagtggaaagatcaaagaagaggaagcattggagcttcttacctgcctctggattaagacgttgacggttaataaggtaagatcgcaggctcacacgcttagctcagccggctctccaatgtatcagaatgttacgatcggaggacagacaacggataagaaggatgcagtcaatgagttaagttttctggtactgaaatccgtggcacagacaagactcacccagccaaaccttaccgtgcgttatcatcagaatatcaacaaagcgttttttgatgagtgtgtcgaggtcatgaagcttggatttggaatgcctgcgctgaacaacgatgagattattattccatctttcattaactggggggtaaaggaagaggatgcatacaattacagtgcaattggctgtgtagagacagcggtacctggaaaatggggatatcgatgcacgggaatgagttatatcaacttcccaagagtcctgctttgtactatgaatgatggcgtggatctgacgagtggcaaacgcttcactaagggatatggaaagtttgagacgatggaaacatacgaagagcttcttgcggcatgggacaagaccgtgagagagatgacaagatacagcgtaatcgttgagaattccatagataaagcaagcgaacgcgatgtgccagatgtactgtgttcagcacttactgatgattgtatcggaagaggaaagacaatcaaagaaggtggagcggtatatgattttatttccggtcttcaggttggaattgccaacatggcggattcacttgcttcaatcaaaaagctggtctatgaggagaagaagattacaagaaaacaattatgggatgcgattctggatgattttacctcggaggaaaatcaaaggattcaggaaatgctgatcaaggaagcaccaaagtatggtaacgatgatgattacgtggatcagcttgtcgtagaggcatatgattcttatctcgatgagattaaaaagtatccgaataccagatatcacagaggaccaatcggtggaatacgttacggtggcacatcttctattagtgccaatgttggtcagggaatgggaactaaggcgactccggatggaagacatgcgtttgaaccactggcggaagggtgttctccagcacataattgtgataagaatggtccaactgcagtatttaaatcggtatcaaagcttccaacagataagattacaggtggcgtccttttaaaccagaagatgacaccacagatgctgtctacggaggaaaacaagcagaagcttgagatgttgattcgtgcatttttcaatcgtctgcatggataccatgtacagtacaatattgtatcaagagagacgcttctggatgcacaggaacatccggaaaatcataaggatctgatcgtgcgcgttgccggatatagtgcatttttcaatgtgctgtccagaaaaacacaggatgatattattgcaagaaccgaacagactttgtaaacaatagagtgaatgtgaaagtgaggaacaattttgaagttaattattgatgatgcaaatgtaaaaatgattaaaaagatctatgagttttatccggtggatggtgtgacaaccaatccttcgattctggcaaaaagtggaaggcagccgtttgatgtgttaaaagaaattcggaacctgattggcccggatgcagagcttcatgttcaggtagtcgctgatacagcagaaggtatgattcaggatgctgagaagattacggaggtgttgggaaagaatacatatgtaaaaatcccatctgtgccggaaggcttcaaggcaatgaaagcattaaaagctcagggatacaatatcactgcaactgcaatttatacgccaatgcaggcatatctggcaggcaaatgcggagcagattatgcggcaccttatattaatcgaattgataatatgggatatgatggcgtggctatagcaaaaaagattcatacaatttttaagaataacaatttacctactgaggttttggcagcaagctttaaaaattcacagcaggtacttgagctttgtgaatacggagtgggtgcggcaacggttgcgtgcgatgtgattgaattgtttgtgaagaatgttgcaattgatgcagcaatttccgcatttgtcagtgactttgaagggcttgtaggagcagaaaaaacaatgaaggactgttaatatgaaggtattatgcttagatatcggtggaacatttattaaatatgcgctcatggaagaggatatgcagtttctgtcaaaggggaaggtgccgacaccgcaagaaggaagagcagaactgattgaaacgattggaaaaatatatgatacagtgcagccgattgacggtattgcaatttcaatgccgggaattattgatagcgataatgggtattgtgtgatgggtggtgcacttcgatataatgatgatttttatttgcgacatagtctctatgagcggtgtccggtaaaaatacatatggaaaatgatgcaaaatgcgctgcaatggctgaggcagcagagggcagcttaaaagaggtggcagatgggtttgtattgatttttggaacgatgattggtggtgcctttatcaaggatcataagctgcatagggggaagcatttttcggcaggagaagtgtcttacgcaatcaccataagaaatggagagcctttcaggcaggatgtatggggaaatcgctgtggaacaccttttttgtgcgaattatacgccaaaaagaaaggtctggagaaggaaagcgtgaatggtgttgcagtatttgatgctgtttccaaaggggatgtgaatgccatagaaagtctgagggagtatacaaaagagattgcggttcagatttttaatattcagaccatgtttgatccggaaaaaatcgcaattggtggtgggatcagtgcccagccaatctttttggaatacataagagagcatctgaaacaaatgtatgcaaattgcatttataatgttccacaggctgaagtggtgtgtgctaaatttcagaatgatgcaaatttatatggggcatttcaatgttatttggcagaatgaaagaggaggttatataatttgcagaatttttgctacaaaacagacggtttcataataaaataaagttagaaagaatgtaatatgttttgagtaataggcagaagaatagccatactaataaagggagtgcagtttaggctgtactctttttcttatttatataaatataattttccattcttatcacagatcaatgcatctactggtaataaattcattgttatttaagaaaacaaaagagcatgaatgcgagatagaggaatataataaaatataattttgtggtgaataatattcaatatattagtttacagaagcagcatatgtcgtagaaaaataaataagcgtttatatcgtcaaccatgttgtggctggcgatattttttattcttcacaaaatcttcacagaaaattagcactcacctcttgacagtgctaacaactcgtgatataacatactcgtaacaaaggaaaaccactgcgaaagaaatttcgtaactgacagaagacgttccagccagcaaggtgggaaggtcttttctttccatcagaaagtttttcagaaggtttttctttttcacatagatcacagagataaatacgagggaggtaagcgtatgaacattcagaaatttactcagaaatcagtagaagccattaacgattgtgaaaagctcgcctatgaatatggaaatcaggagatcgagcaggaacaccttttagtcgccctgttacgtcaggaagatggactgattccaaaattaatagagaaaatggagatccagaaagaacattttgtggataacgcagagcgccatttagctgcccgtgtaaaagtatccggcggacaggtttatgtaggacaggatctgaataaggtacttgtccatgcagaggatgaggcaaaagcaatgggagacgaatatgtttccgtggaacatttgtttttatgcctgatcaaatatccgaataaggcaatgaaggaaatcttcaaggagtatggaattacccgtgaacggtttttgcaggcgttgtcaacggtaagaggaaaccagagagtagtatccgataacccggaggcaacttatgatacattggaaaaatacggatacgatatggtagagcgtgcgagaaaccagaagcttgatccggtaatcggacgtgatgcagagatccgtaatgtggtccgtatcctttccagaaagacaaagaataacccggttctgatcggtgagcctggtgtcggtaagacggctgttgtcgaaggactcgcacagaggatcgtccgcggtgatgtcccggagggattaaaggacaagaaattatttgcactggatatgggtgcacttgtcgcaggtgcaaaatatcgtggtgagtttgaggaacgtctgaaagcggttctcgatgatatcaaaaattccgatggacagatcatcctgtttatcgatgaacttcataccatcgtgggagcaggaaaaacagacggtgcgatggatgcaggccagttgttaaaaccaatgcttgcccgtggtgagttacactgtattggtgcgaccaccttagatgagtaccgtgaatatatcgaaaaagatgctgctttggagcgtcgtttccagccggtacaggtggatgagccgaccgttgaggataccatttccatcctgcgtggtctgaaagagcgttacgaagtattccacggtgtaaaaattacagactcggcactggtatctgcagcagtgctctcaaaccgttatatttccgaccgtttcctgccggataaggcaatcgacctcgtggatgaggcatgtgccctgatcaagacagaacttgactccatgccgacagagttagacgagttgaaccgtcgtgtcatgcagatggagattgaggagactgccctgaaaaaagagaccgaccgtttaagtcaggagcgtcttgcagatttacagaaagaattagcagaacttcgtgatgaatttaacacgaaaaaagttcagtgggaaaacgagaagaaatctgttgaaaaagtccagaaacttcgtgaagagatcgagcaggtcaaaaatgagatcaagactgcacagcagaattatgatctggaaaaagcagcagaactgcagtatggaaaacttccacagctgcagaaacagctggaagttgaggaagaggcagttaagaataaagatctttcgctggtacatgagaatgtcagcgaggaagagattgcacgtatcatttcccgctggacaggaattccggttgcaaaactgaccgagagtgaacgtaacaagacattacatctggacgaggagctgcataaacgtgtcattggtcaggatgaaggtgtcacaaaagtgacagaggcgattatccgttccaaagccggaatcaaagatccgagcaaaccaatcggttcgttcctgttcttaggacctaccggtgtcggtaagactgagcttgcaaaggctctggcagcatgtctttttgatgacgaatccaatatggtgcgtcttgatatgagtgagtacatggagaaatactccgtgtcccgtctgatcggagctcctccaggatatgtcggatatgatgagggcggacagcttaccgaggcagtccgtagaaaaccgtattccgttgtacttttcgacgaggtagaaaaggcacatccggatgtattcaatgtgctgctgcaggtattagacgacggacgtatcacggattcacagggaagaaccgttgacttcaaaaataccattatcattatgacatcgaacttaggttccgctcatctgttggagggcattgatgaaaatggtgatatcaatccggcatgtgaggaagctgtcatgaatgaactgcgtggacatttcagaccggagtttttgaaccgtctcgacgagattatcatgttcaagcctctgacaaaagacaacatcggaaatatcatcaatctgctgatgaatgatctgaacaaacgtctcgctgatcgtgagattacggtagaactttctgacagtgcaagacagtttatcgtagatcacggatatgatccgatttatggtgcaagaccgctgaaacgtttcttacagaaacatgtagaaacactttccgcaaaattgattctggctgacgaagtcagagagggcgatactattctgatcgacaccgagggcgataagcttacggcaagagtgaaataaaaattcagagaagatttatatcttctctgaaagaaaactttttaactttctggcagtttcttcataatcagaaacgccaagatcataaagctgttgttcaagagcagcgtcttttgaaaaggttccaagtggcagatgcctgcttggagcaaatataaaggcgctgccttttttttctaatttatttgcaaggtcgatggaagcctgataattgacatggcggttgtcaatactttcaatcgttttcggatacttgtggagcatgtgtttgtagaccggacggtaggcttccggttgtttcacaaaatcccttgggtttgagagaataaccacggtcttttcacaaccgtgatctaaggcgtgctgcaccggaatggaatcggcaacgccaccgtcataataaaaatggttattcacagaaaccgggcggcagaaacccggcagcgcacaggttgccatgatcgtgcggtaattgtcacgcacgatatcatatttggaaaagtatgtggcttttccggtcacagcgtctgtcgcaggcatgtaaaattctgccggatttttcataatggcatcatagtcgatcggatcggcaccgtcggaattggtcagtgttccgtaaatatattgcagcccgaaaagatttccagtgcggagcaggctgcgcacgctcaaataacgtggatcatccagatgctcggtatagaaacgcagatttcttccacgctgtccggcgagataggagagcgtgtttgctgcaccggctgacacgccgatacagtaatcaaatgtaatattgtcatctaaaaatttatctaaaattccggcactgtaagcacatttcatgccgccaccttctactacaagtcctgttttcatagaaatccctcttgaatcatataaaaagtgtttggttatacaacatatagaatcgtatctctgctttgttaaaatattatcacataattagtcagagtaaagatacagattattgcaaaatgtataagaaatgcgataaaaaattactgccgttactggaacgaggtactaataatttgcaaattattaacaatgtataaagcgttgaaaataactcgacagaaaatcatggaaatgctataatctttatcaaagcattttaattctaaatgagtgaagataagcgtttacatacgcaattgctcaggttcttttatggcagcagccattattctaaaatcagattcaactttatttttaggggttgatctaagaattttcaatgcttggttttcacaattataaaagcagagagaattcgattcaggaagcagggttctctcgatggagacagtcagaaaaatctgcgagtgcgtagagcaggcaggctcagaagacaacgtaaaagaaatctaccgtatttttagtgagaagcagtgaatcgtcctcttgcgtgatcttccataaaattatataatgaaacacaggtgcgtgctgttgttgctccaacggacgacagacagcagcaaatgaggataaaaacggttaacaagtaagaaattgagaggcaaggagatatttttaatatggaaaacaagaaaccaaaaatcattttaacaggggacagaccaaccggaaaacttcatgtgggacactatgttggttccttaaaaagaagggttgaattacagaattccggtgaatttgataagatttttattatgattgccgatgcgcaggcactgacggacaacgcagataatccaggcaagatccgcgataacattatggaagttgcgttagattacctgtctgtcggaattgatccggcaaaatccaatatctttatccagtcgcatgtggcagaactgacagaacttactttctactatatgaatctggtaacggtatcacgtttgcagcgtaatccaaccgtaaaagcagagatccagatgcgtaactttgagacaagtattccaatgggatttttcaattatccgatcagtcaggcagcagatatcactgcttttaaggcaacgactgttccggtgggggaagaccagcttccaatgttagagcagaccaaagagatcgtgcataagtttaatgcggtttatggggaaacactcgtagatccagagattttgctcccgtccaacaaggcatgtttaagacttccgggtatcgacggaaaggcaaagatgagcaaatctttaggaaactgcatttacctgtcagaatctgaggcagatgtgaagaaaaaagttatgtccatgttcacagatccggatcacatccgtatcgaagatccgggaaaactggaaggaaatacagtattcacttatctggatgcattcagcaatgagggacattttgcagagtacttaccggaatatgctaatttagacgagttaaaagatcactataaacgcggtggattaggcgacgtcaaagtgaagaagttcttaaataacgttcttcaggaagaattaagcccaatccgtgcaagaagagctgagtatgagaagaatatcgaaggtgtctatgagatcttgaagaagggcagtgaagtggcagcagagaccgctgcacagacattgagtgaagtcaaagcagccatgaagatcaactacttcgatgacccggcttttctggcagaacagattaagaaatacaacgaataggaagaaaagaaaatggcattcacacatctccatgtgcatacagagttttcacttttggatggctcgaataagataaaagaatatgtagcaagagtcaaagaactcggcatgaacagtgcggcaatcacagaccatggggtgatgtttggtgtcattgatttttataaagctgcgaaagcagcaggaatcaatcccattcttggctgtgaggtgtatgtagcgccgaattcccgttttgacagagaagcggctcatggggaggaccgttattatcatctggtgctgttagctgagaataatgagggctatcagaatctgatgaaaattgtatccaaaggatttgtcgatggatattattataaaccgcgtgtggatatggaagtattgcagcagtatcacagcggaatcatagcgttaagtgcctgtctggcaggagaagtgcagcgctatctggtcaagggactttacgacgaggcaaaaaaagttgccgaaaagtatgaaaactgtttcggaaagggcaactttttccttgaattgcaggatcacggaatcccggagcagcagatggtcaatccgcagcttgtgcgcatgagtcaggaaaccgggattgagcttgttgcgacgaatgacgtgcattacacttacgcggaagacgcagaagcgcatgacattctgctctgtatccagactggaaaaaaattatctgacgaaaaccgtatgcgttatgagggcggtcagtattatgtgaagtccgaggaggagatgcgtaagcttttttcctttgcaagtcaggcaatcgataatacacagaaaattgcagaccgctgtcatgtggagattgaattcggtgtgacaaagctgccacattttgaagtgccacaaggttatgattcatggacttatctgaataaattgtgccatgaaggactcgtaaaacggtatccggacagacacgaggagctgcttccgaagttagactatgagctgaacgttatccggaaaatgggatatgtggattatttcctgatcgtatgggattttatcaattatgcgagaacacatggcattccggtcggaccgggacgaggaagtgcggcaggaagccttgtctcctacacgacaggtatcacgaatattgatccgatcaagtataatctgctgtttgagcgtttcttaaatccggaaagagtgaccatgcctgatattgatatcgatttctgttatgagaggcggagcgaagttattgattatgtcgtggaaaaatatggcaaagactgtgtttcccagattgtaacgtttggtacattggcagcaaagggtgtgatccgtgatgtgggaagggtgatggatcttccgtacagtttttgtgatacgatcgcaaaaatgatcccgaatgaactcaatatcacgattgagaaagcgttacagatgaatccggaactccgaggcatgtacgaatcagacgagaatgtgcgcacgctgattgatatgtcaaagcgtttggagggactgccgcggcacacttccatgcatgcagcaggagtcgtgatctcacagaaggcaatggatgagtatgttccgttgtcgagagcgtctgacggaacaatcacaacacagtttatcatgacgaccatcgaggaacttggacttttgaaaatggatttccttggccttcggacactgactgtgatcaaggacgcagcagatctcgtatataagaaccacgggatcaaaatcgatgtcaaccacattgattataacgatcatactgatccggatgcggtgctcatcgattacaatgataaaaaagtattaggctacatcggaaccgggaaaacggaaggcgtattccagttagaaagtgccggaatgaaaaacttcatgaaggagctgaaaccacagagtttagaggatgtcattgccggaatttccctgtaccgtccgggaccaatggattttattccaaagtacatcaaaggaaagaacgagcgtgacagcatcacctatgaatgtaaggagctcgaaccaatcttagagccaacttacggctgtatcgtttatcaggaacaggtgatgcagatcgtgcaggagcttgccggatatacgatgggacaggcagataatatccgtcgtgccatgagtaaaaagaagcagtacgtgatcgatgcagagcgtcagaactttgtctatggaaacgaggaacagggaattaagggctgtattgcgaatggcatcagtgagcaggcagcgaataagatttacgattccatggttgattttgcgaagtatgcgtttaacaaatcacatgcagcagcctatgcagtcgtttcctatcagacggcgtattttaaatattactatccggtagaatttatggcagcgctcatgacatctgtgatcgataatacaagaaaagtttccgaatacatttttacctgccgacagatgggaatcaaggtgctcccgccggatgtcaatgagggagagggcgtctttaccgcggtcggagagaatatccgctacggactgtacgcgatcaagagtatcggaagaccggtggttgatctgatcttgcaggagcgtgcggagaatggaacttataagacactgcaaagtttcttggagcgtgtttcgtgcagagaggtgaataaacgtaccgtggaaaatctgatcaaagccggtgccttagatggcttagacggcaacagacagcagatgatcactgttttttccacaatcatggataaccttgcttcggagaagaaaaagagcatgtccggacagatgacgttgtttgacctcgtatcagaggaagataagaaagactatgaaatcaggcttccgcagttggaggagtacagcaaggagatcaagcttggctttgaaaaagaagtgcttggcatctacctgaccggtcatccgttagaagaatatgaagaacgctggcgaaaaaatatatccgcagtcacgaccgattttattttggacgaagagacaaatgcggtgaagatcaaggataaccagaaggtgaccgttggtggaatgatcacggaaaaaacgatcaaatacaccaagaacaataaagtcatggcatttcttacgttagaggatctgcttggaacagtggaggtcattgtatttccgaacagttacgagaagtacagccagcttttaaacgaggatgaaaaagtatttatcacaggccgtgccaatgtcgaggaagataagaacggcaagatcatctgtgagcagatcacctcttttgacagtgtgaaacgcgagctgtggcttcagtttgctacgaaggaggaatttgaagcaaaggagcaggagctttatgcaaagcttcatgattctgacggaagggacgcagttatcatttacatttcatccataaaagcgatgaagcgactgccaaataactacaacatttgcgtgaatcaggagattgtgaacaatttgacgaactttttgggtgaaaataatgtaaaagttgtagaaaagagcattgaaaagagagcgtaaagagattaaaatagtatacattggaaaataaatatctgtaaatgggtaaacagatattcaatgggtatatttattttttaggagggaactataaaatggcaaaagagatcaaaacaatcggtgtacttaccagtggtggagatgcacctggaatgaacgcagcaatccgtgcggttgtaagagaagcaattgtaaaaggattaaaggtaaaaggaatcaagagaggatacgcaggacttcttcaggaagaaatcgttgacatggaagcaaaagatgtatctgatattatagagcgtggtggtacaatcttacagacagcccgttgtatggagttcacaacaccggaaggacagcagaagggtgctgagatctgcaagaaacatggcatcgacggaatcatcgtaatcggtggtgacggatctttcaaaggagcccagaagttagctgctttaggaattaacacgatcggacttccaggaacaatcgacctggatatcgcatgtactgagtacacaatcggatttgatactgctgttaacacagcaatggaagcaatcgacaaagtacgtgatacatctacatcccatgagagatgttctattatcgaggttatgggacgtggcgccggatacattgctttatggtgtggtatcgccaacggagcagaggatattctgttaccggaaaaatatgacttcgacgagcagaagttagtgaacaacattattgaaaaacgtaaacatggcaagaaacatcatatcattgtaaacgctgaaggtatcggacattctgcaagcatggcaaaacgtatcgaggcagctaccggaattgagacacgtgcaacaatcttaggacatatgcagcgtggtggttctccaacagcaaaagaccgtgtatacgcttctaccatgggagcacttgcagtagatcttctgtgcgaaggaaagagtaaccgtgtcgttggataccgtcatggtgcttttgttgattttgatattgatgaagctcttgcaatgaagaaagagattccagagtacgaatataagattgctaaggacttatctatttagtataacttaggatttcacgagatcagattctaaagatcgccatacatgtatgaatgttgagcggttctgatcgaaatgacagggaacaaaaactccacggattttgattcgtggagtttttatcactagggggcagattttgtgaaacacttgatacacgacaggttatgactgtttgcctcttgcaacatcatatatttttggagaaaagaatgatcacaagtacagccaatcagcagatgaagaatctggcacttttaatgaaaaaggcgaaagcgagaaatgaacagggactttttgttgtcgaaggacggaaaatgtttcaggaagttccaaaagaatggttaaaacaggtgtatgtgtctgagaactttttcactgagcatgaggaaatgctttcgggatatacttacgagatcgtgtcagactctgtattcaaagcgatatcggatacgcagacaccgcagggaatcctctgtctggtgaagaaaccggagtatgcgctggaggaactgttaagaggcagtgagacgcatcttttgatcttagagagcatacaggaccccggcaatcttggaaccatgctccgcactggagaaggcgcaggaatcactggcgttgtcatgaaccgcacgactgtggatctgtttaatccaaaaacgatccgttctaccatgggaagcatttaccgtatgcctttttttgtgacagatgatcttgcagacaccataaaggaactcaagaacgccggaataaaaacctacgcagcccatttgaagggaaagatgcagtatgacgagcctgattatacaggggcaactgcatttatgatcggaaatgaaggaaacggattgtcggatgaaatcgcgaatcttgcagacacttatattaagattccgatgtgcggacaggtggaatctttaaatgctgccatttccgcatcacttctgatgtatgagacaaaccggcagcgcagacacgcatagaagcatcgtaacttggaaacacagatgtgctgaaaaacaaagcagtaacttgaaagtgcagaaatactgtaataaaaacaacaatcaaaactgctcatgagacagaaaagaaacaggattaggaaaaaacaatgaggatctggtttaaaataatgaaggataatcatctgcttcgtgatacaacgatcacagatgaatcagaggatacacgtacccataaaatttttcgggcgatcgatgaagtgtgctatacgtttgacttaggaaaaccaatctggttagacgccaatgtggcagaatttaaacggcatgcaaagaccagatttacgcaggacagttttattgagtcaattgactttgacttcttagagatgcatgtcattgaggaagattaaaggataaaagaaggagaaccggcatgatagaaggcgatatcagacgaaagaaaataattgagttgatgtcagaacagaaagaaccgatcagtggttctgatcttgcaaaaaagttcggcgtgagccgtcaggtgatcgttcaggatatagcgttgctgcgcgctaccaataagaacatattgagcaccaataaaggttatttcctctatcacccggaaaaaggactgcaaaaaccaaagagaagtttctgtgtgcagcatacaacggaacagatgcaggacgaattatacaccattgtagattacggtggaaaagtattagatgctgtcgtggagcacgatatttacggacagatcaccgtggatctgatgctctgcaaccggatggatgtggatgaattcatggagcgtatccgaaagagcaggagccagccgttaaatgtactgaccggaggaagacactggcacacggtggaggcagacacggagccgatgttagatatcatcggagagaagctgcgtgaaaaaggatatatttgcatggaacagtaacataaaaccttcattaaaaaactgtaaagttttgaaatatctccccatatcatagaaaagtatggtatacttaaggagcatgagggttgatggataaaagtttttttcatgcatggggaatatatagttggaggaatattatggatagaccatttaccttaagtgaaggggtagatagttggaatacaattatttttttataccggtccgcgttgaaggaagtcagcaccaaagttgagattttaaacgatgaatttcagcaggtgcatcagtataatccaatcgaatacattaagtccaggatcaagtcgccggaaagtattgtgaagaagctgaagcgttacggatatgagagttccattgataatatggtggatcatattaacgatattgcaggaatccgtatcgtttgctcatttacttccgatatttataagcttgcagagatgatcggcaagcagaatgatctgacggttgtttccgtgaaggattatatcaagcatccgaaggagagcggttataagagttatcatatgttagtaactgtaccgatttttttatcggacagggtggtagatacaaaggttgagattcagataagaactatggcgatggatttctgggcaagtttagagcataagatttattacaagttcgaaggaaatgcaccggaatacatcagcagggacttaagagaatgttctgagatcgtttctatgttagatgccaagatgctgcagctgaacgaggcaatcattgaggcaagggcggcgcaggaggaagagacaaatgcagtttaattacagctttgaggtagcttcactgctatttatgttgttaatactcatacattttatggcagtgcggcagtttcctaccgcaaagacgcgcgtgtttcgggcactcttgatcgtaagtatcgcagagtgtgtctttaatgttttatcatcaataggactggcaaacgcagaattcgttccacagattgtgaacgaagtgcttgcgtttgtcttttttgcgtttgaaggattaagccttttgatgatctataaatatacagtcgtgatcagtgaactggacccgaagcagaaaaagtgggctgctctggcaggactgataccggcagtatttttctatgttttcctgttgctgacaccgtttatcggattctattattattttcaggacggtgtgtatcatcagggaagaggcgcaaattttggttatttttatgtcatgctgttttttgcactgaattttgtaatgctgatcgcaagacggaaagtgatcaatatgcgggagagaaatattatctatttttacactgccacagcgtttattgcaatcattgtacagtattttaaccggacaatcctgctatcaagttttggaaattcagtgatcatcactatggtgtatctggctatgcagaatccgaatgaccttcttgacacagtcacgggaatcggcaacgaggcagcactggagttacagttaaaggatgctttaggacgaagcaaggagggaacagtcattgtcattaaaatccggcagtaccagcagatgaatatgctgtttggcaccgaaaacggcaatatgctcatggcggaagtcggacaatatttattcaatcttggcggaaagtttcatgtgttccgcagtgagtcggatacgtttgcggttttatcggacaaggaacattaccgtggcattgtaaagagtatcgaagatcgttttgcggaggaatggagaatcgaggaaaatcatattctgatcgactatgccattgtgatcatgcattatccgaaggattttaaatcgattccggaatttttcggaatcaagagttacctgttatcggcggcgtcagaaagtgcggtcaaagatccaatcgagacagatgagaagatgatcgagggatattacaggcagaataagattgagatgatattagagcgcgcaatccgggaacgttccattcaggtgtattatcagccgatttattcattgcaggaaaaaagaattgtttccctggaagcattatcacgcttgtttgacgaggaacttggctatattccgccgagtgaatttattccaatcgcagagaaaaacggtgacattgtgcgcattggtgagatcgtgttagaggagtgctgcaagttcttatccaaacatgtcctgtcgaatatgtcgcttggaatccggtcgattcaggtaaatatttctgtggcacagtgtatgcagcagaatctgaaagaggcaatcctgccaattttgcagaaatatcatattccgtcttccatgatcgtactggagttgacggagagcacggcaatcaatgctccggtattaatggaacatcatatgaaagaacttggaaatgcaggaatttcttttgcaatggatgattatggaaccggtaatgcaaactgttcctacctcgtccgtttcccattccgcgaagtgaaaatcgaccgggagatgacatgggcatattttaataatgaaacagccagggttgttattggaaatgagatcaagaccatgcagaaactgggaatcccaatggttgtggaaggcgtggaaaagttagagcagagcgaagaaatggaacgccttggcgtagagtatatacagggctattattatggaagaccgctgccggaaatggaatgtctgcggtatatccgcaatttcaattcgacaccggaagattatggaaggtagacagtcagatttatgaatattatcagtgtaacagacatcacgaagacatatacagagaggaagctttttgagaaagcttctttctatttgcaggaaagagaaaaagtaggtgtgatcggaatcaatggaaccggaaagtcaacgctgttaaaaattgcagcggggcttgaggaaccagacgaaggacaggtgatccgtgcaaatcatattgtagtgcgctacctgccgcagaatccaatttttgatccggaattatcagtaattgatacggtgctagcccagagtagtcagaattttgttggaggaacatcagggcaggatcaaaatgcaggaaatcatgcagaacatatggaccactggaatttagagagtgatgcaaaggcgatgatgacaaagcttggcattacgaattttgagcagaaggcaggagaactctccgggggacagcgcaagcgtcttgcacttgtggcagcacttttggtgccatgtgacgtgctgatcttagatgagccgacaaaccacctggattctgccatggcggactggttggaagattatctgaaaaaatggcgtggcgcactcatcatggtaacgcatgaccgttattttttagacagcgtctgcaaccgtattgtggaagtagacaagggagctatctatagttacgacgcaaactattccggttatcttgaacttaaggcagagcgtgaggagatgcagcaggcgagtgagagaaaacgccagaacattctgcggaaagagttagaatggatacgccgtggtgcaaaagcgcgtactacaaagcagaaaggcagaatacagcgttacgaaaaactcaaagatcaggcagcaccgcagacggacggaagtgttgagatcagttcgatcagttcccgtatgggaaagacaacggtggaattgtcgcatatctcaaaaagttatgatacaaaagtgctgatccgtgattttacttatattttcctgaaaaatgaccggatcggatttgtcggggcaaatggaagcggtaagacaacattaatgaagatcatcgaccagagaatcgagccagatgagggaacggtgacgattggacagacaatcaaaatcggatattacacgcaggagatcgaaaacacgaaggatgcgggcattgcctatatggacccggacgaaaaagtcatagattatataaaaaatacggcagaatttgtccggacgaaagacggtcttgtgtccgcttcgaatatgttagagcggtttttattcccggcttcgcagcagtacagcccgatcggtaagctttccggtggcgagaagcgcagactgaatctgctccgggtgcttatggaagcgccgaatgtgctgatcttagatgagccgaccaatgaccttgacatccggacacttacgatattggaagattatctggataactatgacggtatcgtgatcacggtatcccatgacagatatttcttagatcgtgtggtaaaccgtatttttgcatttgaggagaatggaaaaatctgtcagtatgaaggtggatatacagattatgtaaatcgattggcagaggaaggaaaagttccggcaggacatatttttgatgcaaaaaatgataacccggtatcttctgacaccacagtatcttccgataccacagcatctttcaatgccatagcattttccaatgctggagaaaaggcaaagcagccaagttctatggatacgtggaaaaaagaacgaaagctgaaattcagttacaaagagcagaaggaatacgagacgatcgaggatgacattgctgcattggaagaaaaaatagaagaactggatgcgcagactttaaaattcagcagtgattttgtaaaactaaacgagatcaccaaagagaaggaaaagaccgagcagcttctggaagaaaaaatggagcgctgggaatatttagaagaactggcagccaaaatagcagaacaatagagactggacagcagtttgaatgcataaaaataacggtgagaaaaaatcggaaagtatgattgaaatcagcgataaaagatgatactataataaaaatggtgtgagaaaaaatctcacggagggataatgaatgatacatcaatttacctttgagaattataaagcatttaaaaatgaagcaacgttagattttatagctgaaaatattagtgagcataaggaaagtttgatcaaaactaaaaatagtgaagaaagttatgtgccagtaatagcaatttatggaccaaatggtgggggaaaatctacagttcttgaggcgattattgatctgagaaatgtattgattaagtatattattatgacaaaagcgtcagggaatgaagagtatgaaaggataatccagcgtgaatcgttgacactgaaagagacttattacaagttacttcctgaatataaaaatctgccgacaaaatttgatattatgtttcaaattgaacaagaaaagtatcgatatcaactttcattacagaaggataagataacagaagaaaatctatataaacaaaatttgttgagtggagatgttgaacttatatttgaacgtgcagaagaagaatgtactcttggagaggaagtagaaaatattccagtagaaaaagtaagtgatacaatgcctttgttagcacatattgcagtcaattacgatatagagaccgtagataagattatcagttggtttttgaacattgagattctggattataataatccgaaaagcgagaagcgacttgtattgccaaagacggacgaaaaaagaaaacttatatttgaaatgttgagtgaaatggatattccaattaaagatattcggattgaaaaggatgaggacggaaatattcgaaatatttacacaaaacatcttatggaaaatggagagtattgtgagataaaacttgaagaggaatctagtggaacaagaaaattactgagttgtctggcaagaattaatcagtgtcttgaagaggggaaactcttaatcgcagacgagttggatgcaaagcttcatccgaaactcttacggtatatcatagagttgtttaccaatcctgataagaataagaatggggcacaattattgtttacgtcacatgatatatcgactatgaataaagaggtatttcgtcgggatgaaatatggttctgtgcaaaaaatccatatggcgcttcaaatttatattcccttgtttcttttaaaaaggacaatggaaagcatataagaaatgatgaagcatatgggaaacgttatttagaaggtcgctatggagcagatccttatattaaacaaataataatgtgggaggattctgatgagtctgaagccaaaaaaacacagtgagaataaaaaagaacaatccagacttcaggaaaagatgaaaaaacggcaaaagcaaatggagataccattgttgccaccatatacctacattataagtgagggaaccaaaacagagccgtattatattggaacaattgcggaaagagtaaacgaaaaatatagagagtattcaacaggtaagcgtattatagtagaaggaacaggtagaaatacgaagagtttgttggaatatgccagaaatactgtggataaaaatttcccacaggcagaggaagtctggctgatgtatgataaggatgattttccagaggataattttgacaatacgcaacacagtgctgaagacagaatggacaaaagaaaatatcgtgttgcatggtcaaacgagtgtattgaattatggtttcttttacactttcaagaggttacaagtaatattggaagagataagtatatagagcgattgaagctatatacggattatgagaaaaataaaaaagatatttatgatattttaaaagataaaacagaggttgcaattgcacgcgccaggaagcaatacgaatcatatgggaatcaaccaccatcaaagcgttgccctgcaaccagagtatatgaactggttgaaaacttgcatagatattaaagagactaaaggaatattcattttaaaaatttgatttatggaaaattaagaatagtataaagggcaaattatgtgtttttgccccttattttgagattatttaaagatctgtatgaacacgttcatttttgtgcacaagctttgacagtctgttaaagagactttgtggcagcgcaaaaccgaagataatgccaagcacgatcgaaccggcaactttcacagtactgattccgtactgtgagaaccggctcatatctcccatgataaaatagtaagaggtataataaataccggcacccggaacaagtgggaagattccggtgagcaggaatacagtgaccggggttctgcgcactgccgaaagaatccgtgcaaccagtgtcagtgcaaaggtggcgatcaggtttgcaatcgcattgtctgtgtgatactgtaagcagatcaggtagacgatccagccgagggcacctgtcagaccgcagaaaaacaactgttttttttctgccgaaaataatacagcaaaagagagtgtcgcagctaagctgacaagaaactgaatgatcatcgaagtaatgcacctcctgtgataagctggtagagcgtgataacagcacccacgccaacggcaatactaaaagcagttaagatcgcatcgatcatatggatcgcaccggataaatagtctccgttgaaaaagtcgcggatggacgttgtcagtgcgattcccggtacgagcggcataatatctccaatgacaaccttatcctgcaggatcggtatcccggcggagagcgcaatcaggcttaagaaggttacaagcccacttcctaaaatatttgtgataaatttggattctaagtgtctgtcagagacaatcaggaaaatctgcaataccagtccgataaaaaatgcaacaaatgcatctaaagcagttccaccgaacaggtaacagaatcctgcacttcccacaccacagaaaaaaatctccacccagtttttatttgtcgggatcgatttacattcttccagacgtacccatgcatcacgcagggaacattcatgggaacagatctctctggaaagctggtttaatgcagcaatcctgccaagatgtgtggagccgagcggtacgtggcggatcatgctgcaggcatcttctttattttcgtttgcactggcgaagattccgttagagagcacatacacgtcacagtcggtgatctcatatgcttttaaaatatgaagcactgtgtcttctacacggtagacttcggcaccgtttcgaagcagtgcgtctccggtttcgacagccagagtcagaatttcttttgttactgccataattgtcctcttttatataaagttaaaagtcatagtcctatgaaaagttatcatgttttgggaaaaattgcaatggaattatagtgtagtatgcatatttagggcaattcacatacataataagtaatagcgacaggtaattacgaaacgtatgcgtaaagtagatttgatttttcacaatcttcacaacctacattaatgtcaggtttcgtatacaagagcactttaggaggacaaaaatcatgaattgcaaaaaatatagaatctgtctggttctgcttgtgttggcagtactggcgggaagcgcattttattacgtggcgagtgagaaaaatgccaacgaaccgaaggacggtatgctggtacaggaaattcctacaggggaaagcgtggagaatgcatgagtgcaaaggatacgctttatttaaaaattgaccagaatattgtggtgacagaccgccgcgtaacgatcggtgacgtggcaaaaatggagtgtaccgatcaggcggcactgcgccagattaagcaaaagaaactgtattccttccacgcagaaaatgagaagaagaaaaaaaatatgctggttgtattctcggtgctgaaagtgatcgagctgattcacgaagattatccgaatctggatatcagcaatgagggagaatccgattttatcgtggagtatgtaaaaacaccggaaaaaccggtgtggatgaaccgcctgaaaacggtgattttatgtatcctgatttttttcggagcttcttttacgattatggcatttaacaatgatgtcggtgtgacagatgtttttgcaaagttttacaaacagatcacaggaatggaatcaagcggtatcacggagttagaaatctgctacagtattggacttgcagtgggaatcattgtctttttcaatcatgtgggacataagaagattacacatgatccgacaccaattcagatcgagatgagaaaatacgagacagatcttgacaccgcctttatcaataatgcggaaagaagaggacactgtgttgatgtggattaaacatttatttctgggatttatcgggcttgcctccggagtgggagtggcagcgggaacgtttgcatttatcattgttatcggcgttgtgccgcggatgatcgcgaagtgcaaccgggcagaaaatacattgctttttgaaaatatgattgtgcttggcggcatttttggaactgttttgtctgtgtttaccgatctgatgtttccggtggggcattggcttttatatgtgtatggtttttgtgccgggatttttgtgggctgtattgcggttgcactggcggaaatattgaatacatttccaattattttccgcaggtttcaggtaaaagaagggttggagtggattatgctgtttatggcacttggaaaatgcgcaggttcgttctggtatttctgccaccacatgacaccgccgtgacagacagcatttcaggagactttcataattggattggcaattagcgtgaataatattggaaagcataataacaggatgaaagagaatttgacggatatgttattttgacataagataagaactataaaatagcgaatgagaaagcgagtgtaacatatggtcacttccattgcacgccagagcgtgattttaaaatgcaacatgcaaaaagcagtgatgcttggcaactatgaattttattatggagcaggagtagctggaaaaataggcgggtttgatataccggatgatattaagccgttggaacttagggagcttctggatcataagctggatcagatcagtccaaaagatgagaaagagacatatctgatccagattttaaaagaatttcgaccggatgaattatatgacgaacagatgaaagaactgcttttgtggggaaaaggggagcagtacctgtggagtgtcaatgttccacagtaacgatcagaaaatctgatactgatttctgccatttcctttcgaacaatacatggctttatcagccgcaatatacaattcttccatttgaatctctgcgcggtcggcaaaggaaataccgatacttgcagagatttcgctccattctggtttccttgcagaaagtccgcggatagcagtacacaacttgtcagccacagcttttgcatcttctttatctgagacatttccaagatatacaataaattcatcgccaccaatgcgcccaacgatatcagaggtgcggacggaggatttgatcgtgtcagccacagcgattaaaagtgcatcaccctccacatgaccgtaagtatcgtttaccagtttgaatttatcaagatcaatgctgatcagtggacgtacacaggaaggattttttccgtcagtttccatttgttttgcaatctgttcctctgtggctctgcggttataaagaccggtaagcggatcagttgctgacataatacggatctgccttgttttgcggttatggatgagcagaataccaagcagtaatgctaaaagcgttgcactgacagctaaaatgatcggaatagatattctcggataagcaaatatcaaagtcacaagggaagggttaccctcataaatactgttctgtaaaacaatcgaatccatttttgaagaggaaatacatgccagtcctttattcataatactgagcagtcttggatcacagtggtcggacagcgcaaaggaaatatcttctgtcatggcagagatcggtgtggaagtcaacgggcggtattgtacctgtgaaagcagataatttgcaacatagttgttgacataagtgcaatctgctttgccggtgacaactgcatcaaaacaggaatcaatggaatcgtaataaaggatatctgtaaaatgattcccaggatcattgataatggaattggtaaagtaaaagttacgcggcagggcaacgatattgcgtgtctgtcctttggcggtctggctgcggatgacaacaatggacgtattaatataaggtgtggtgaggaaagaatgattctgctgcgcccactgataattgtgcgccatagcagacaggacatctacctcatggttttggattttagataaagcgtctgtaaaattgtcagattccacataggtaaaatgcagaccggtaaattctgagatctgttcgagtacttctgtggaaataccggagcagctatgtgtttttttattataatactcaatcggcgcgtttgcagggtcgtaagtgactgtgatcgtaggattggaatggatgtattctaattcttctttggtaaattcacagcggtaattccgcgtatctttctggtaggaggcatagagatcatgttcaaagtcagcgttcacatccgtgatcacagactgtgcagcatttaaatcttccatgatcggatttcccttaaaagtaacaaaatataatggaaaagaaggaagactggcaagaattttcttttcagaggcgtgcgagacatttatagtataaatagaatcgaccgttccgtcctctaaagccttctccagttttgccgtgtttccataaaagactttttcataggtgaaattgtgagtctttgcaaaatcatccaaagcctcgatctggttgcagcttgccagaataccgatcttcatattattaaaatcagagtagccattgtaataaagtgaatcattatctaacatcgtgtaaagtccatagtgggtagtgatcgccggctgcgcggaaaaatccatggtacttgtgcgcgaggtggaataatcgacaccgcagacaagatcgatatttttatcgtttaaagatttcaggcaggcggaataattcatctggataaattcatattcccagccggtgtactggctgatctcgcggagatagtccacataatagccactgtagtttccgttctcatcacactcctgataattatccagtgtgtaaaaacctactttgatcaccttttttccatcacgggcaaaacagtctgccggggacaatgtggtgagaaatattaaaaaagaaagaaatatgcaaataaactttttcacgatagtctccaataatgaaaaatcaatatttttcgatattaataaatattgatttcaagcaataaatataacattattatactataggaatctgtgatttcaattagtaataccagactggattattagaattacttataaaataaatggcataataaaacatgacttattcttagaaaataagaaaaaatcataaaggtcatgaaatccaagaacgtatatgatgtatattttcatcagaaaaatgccaagctaacaaagagataatgaaaatcatgcataacataaagatatgacagaaatgattcagggaggcggaaaaaatggcaaacaatgaagcagagaaaataaaaagcttaaatgagacagtacacagcaaagataaaaaggaacgcgatcaggcgtacaacgattatgtgaaacaggttacaccgacacataatctgatctttaacatggtcaaagcattttttacaggcggtatcatctgctgtatcggacagtttattttaaacacgtgcgaaaattatggcttagacaaagacacgtccggaggctggtgcagcatgctgctgatcttgctcagtgttatcctcaccggatttaatatttatccgtcgattgccaactggggcggtgccggggcacttgtaccgatcaccggattcgcaaatggtgtggcagctccggcaatcgagttccagaaggaaggacaggtttttggtatcggatgtaaaatctttacgatcgcaggtcctgtgatcttatatggtattttttcaagctgggtgttagggctgatctactggatcttttggtaggatttttgccacactatgtatatgtcctttttatgggagatttagtataataaaattatcctgacaaatgtgtaaccggaaagaaagggtatcggtatctggcatattacgcaggataatggataaagtgaaaaagatattcaaaatttgaaatatacatggcattacgtttgttgaagacggataaaccatgatataattacaggattatcttagctgattctttaccaactgaaattgtataatacccaagaggaaatacgcatggaaaaatggtctgaaattatcaaaaatatattaaaagtcgttgggattctggggttattcattctgatcgcactgctgatcgaggaatattttgtggcggatgcactggttccggcaatcatggtgcttgcggtttttgtgatatcctacatcacggacggttttttatacggaattattgcatcaatacttagtgttctggcgttgaatttcgcgtttgcgtttccgtattttgcatttaactttcatattacggaaaatatcatcactgccattgtcatgcttgtgatcacgattatgacaagtacattaactgcgcagttgaagatgcaggaaaaggtgtgcattgagagtgaaaaagaaaaaatgcgcggcaatcttttgcgggcagtttcccatgatctccgcacgccattgacctctatcagcggttcgagcgcagcaatcgttgacaattatcatcagctcagtgaggagcagatcttacagctctgccgtggaatccgggaagattcccagtggctcattggcatggtggagaatattttatctattacgaggatcgacaatgagggtgtgaaattgaaaaagacgccggtggtgttagaggaactgatcgattctgtcctgacgcgttttaaaaagcgttatccggatcagaaagtggatgtgagcatcccggaagattttgtgagtatccctatggacgcagttctgatcggacaggtacttttcaacattatggaaaatgccatgcagcatgcactcggaatgacagaattatccctgcgtgtttttaccataggaaataaagcagtatttgagatcatggatgacggctgtggaatggaaaaggaacagctcaaaaatatttttaaagattactttgtgatacgggagacaccggtagataatcagaaacgcagcatgggaatcgggttagcggtctgtgcttctatcattaaagcgcatgacggcgtgatcacagcagagaaccggaaaggcggaggctgctgttttcggtttacgctggatatggaagaaacagagtaaaaaagggagtcggtacatacattttatgaacagctataaaattttagtcattgaggacgagaaaaatatttgcaattttatgaaaatgatattggaaacgggaggttatcaggctctgtttgccggaaatggaaaaaacggactattaatgttctattcgcatcatccggatattgtaatcttagacctcgggctgccggatatggacggcatggaagtgattgcggaaatccggaaacaggctgagacgccaattatcgtgctatctgcaaggacagcagagcaggataagatcgaggcgctggatcttggggcaaatgattatatcacaaagccgtttggaacaggagaacttttagcgcgggtgcgggcgtcgcttcgaatcaaccgttttcagggagtggagccaaagtctttaaaacatttcaggctatatgatcttgaaatcaattatgatgcaagaaaagtgacgatcgcaggggaggaagtgcggctgacacagacggaatacaacattgtgtcactgctcgcaacttatgcaggaaaggtgctgacctatgcagatattatcaaaaaaatatggggttactccgacaatggaagtgtgaaaaagctacaggtcaatatggcaaacatccggaaaaagtttggcgaaacgccaggcgagtaccgttatattttaaatgaacttggggtaggataccgcatgaatgatgaagaataaaaaacgcttcgcaatttttacaggctgatgaatgtttgtggtacatcagctgtatgattgcgaagcgtttttttagaatttatcagtcatataacggtgttccgtttttgattttacgcacgattttgacacctaagatccagaacatggagatgacaatgtaaagtgtagaagcaagaccgatcactgatccaaaaattgcaaaaataactaagccgatattcataatatgttaattcccttctttttcgtttttttcatttggtttttcgtcgtgattttcaaaccaccacataaaaatcccagcgccgataacggcagcagtaagaactgcaaataaaatatgttcaaccataaaaccatacctttctgatacctgcgcattttgggcgcagatatcctgaaacaagatttttgcgtaccaaaataagaccgccgatacgatatgcggtaatcagtaggaaaatatggtttaattgtttttcttgccgtccttgttatgaatataacgaatgatgacatccctgcatggcgtgtgataagcaagacttaagatactgcatgcaaaaatgacaggtaacatctgtgaaagaagttccacaataagaaacagacagtttaaggcacgacttgtgcgtgttgtgatacgtctgccttcctgacgcagataagcgttcgcagagaccatgcgttctgaggtctcagaggaaagctgttgcggaatctccgagaaatcggaattctcatatacgctgtctgtgtgatgaatgattccatacattaaagaagaatctgcctgggtactgccatagcacaatccaaggagaagcatggcgaacataagtataaagctggtaaatttctgacgggttgttcgcatgatgttgtttctcctttctcctgatcgaagtataaaatccatgactattttacatcaaaaaagaaaagcagacaatagagaaacattatttttgcgatgacagtgtggggaatcaagtcgcgtcatgtgaaacgtgcaccctacgtgatccttacactgctggcgttttttgagtttccgatgctctattatatttatcagaccggaacgatcgtgtatatgatactggcgatggtagcaatcgcaacgtttctgccgacatcatcagtggtactttttggcggactggcttatgtggcggatatcgtggcagtactgcttgcatattttcatccgatgaatgtggaaaaagtgacgagcgagagcgccttaagttctacgatctgctcgttagtgatcgtactgtgcagtgtgtttaccatcacgatacttttgaatatgcagcagaacctgccggaaggtggaatcgcagtccgttttggcggagaggaattcatgctgatccttccggatgtgtcggaagatgagatccgccagaggttagcaaaaatgcgtgcggattacaagttatttggaaagcagaaaaaacagaccgctttcacctttagctgtggtgtcgagaaatatacagacagcatggatgtctcggatgtttacagacaggcagatgaaaagctgtatcaggctaaagaaagaggaagagactgcgttatttttgaagcgataagaagttgattcagaacatttttacatgtatatgataaagtttatcaattagtgatgttagacttgagtaaccatgatatcccgctctataatttgtacgaagcgagagaaaaagcagaaagcttcgtaaaaaaatcaatgacgaaagcataaaaaaagagctttcattgtatacagaaggaggaaattatcatggtagattggaagaaaattgcattatttgcaggtggtacattattcggaacggctggtgttaaagttttagccagcgacgatgcaaaaaaagtttatacacagtgcacagcagcagtattaagagcaaaggactgtgtaatgaaaacggtaacaactgttcaggagaacgctggtgacatttacgaggatgcaaaagcaatcaatgaagaacgtgcagcagcaaaagaggcagcagttgttgaagatgcagaggcagctgtagaagaagctgccgagccagcagcagaataagagtcggatagtaataaggggctgtcgcacgagatgtgtggcagccttttccaacgattaagtggaaggatgtaagaaagatgaaatttatcataaaacacgagacaaaggggagaatgcgtattcatgcagtacagaaccgcatgagttatgcgcaggcagatacgcttctttattttttacatagtcagaaagaagttacttttgcaaaggtatatgaccggacctgtgatgcggtgatctcctatgtgggaaaccgggaaacgatcattgaactgctccgtggattccattatgaggaggtagaggttccgaccgggctgatcgagaattcagggcgtgagttaaacaacacttatcaggaaaaactgatcagcaagattgtgtttcattatgcgagacgctggattcttccttatccaatccgcatctgtctgacttcaatccgttccgtaaagtatatctggaaaggactgaaaacacttgcggcaggcaaaatcgaggttccggttctggatgcgactgcgatcggagtttccgtgctgcggagtgactttaacacggcaggttccattatgttcatgttaggaatcggcgaattgttagaagagtggacacataaaaagtctgtggatgatctggcgcggacgatgtctttaaatgttggaaaagtatggttagtcagtggtaaccaggaagtattagttccgacatctgaagtcaaagccggagacaggatagtcgttcatatgggcaatatcattccatttgacggcgtggttgcagagggagaagctatggtaaatcaggcttctttaaccggagaatcggttccggtcagaaaaatggcagagagtactgcatatgcaggaacggttgtggaagagggcgaacttacgatccttgtaaaagaagttggtggatccagtcgttttgagaagatcgttacaatgatcgaagagtctgaaaagttaaaatcgggcgcagagagcaaagcagagcatttagcagataaactggtgccatacagccttggcggcacaatcttaacctatcttctcacaagaaatgtgacgaaagcgttatccattcttatggtagattacagctgtgctttaaaacttgccatgccaatctctgttttatctgcaatccgggaagcaagtctttataatgtcactgtaaaaggcggtaaatatttagaggcaatcgcggaggcagatacgatcgtattcgacaagacaggtacattgaccaaagcaaaaccaaccgtcgtcgatgttgtttcctttaatggagaaagtccggaagaactgcttcgcattgcagcatgcttagaggaacattttcctcattccatggcgaaggcagtgacggatgcggcagtccagcaaaacttagagcatgacgaaatgcacagcaaagtggaatatattgttgcgcatggaatcgcttctactattaatggaaaacgtgcagtgatcggaagtgcacattttgtatttgaggatgaaaactgtgtgatcccggagggggagcaggagaagtttgataagcttccgaaggaatactcgcatttatatctggcgattgaaggaaaacttgcagcagtcatctgcatcgaagatccactgcgtgaggaggcatccgcagtcattcagtctttgaaacgtgccggtttatccaaggttgtcatgatgaccggagacagcgaacgtactgcatcagccattgcaaaacgtgtcggcgtggacgaatattactccgaggtactgccggaagataaggcaagctttgtggagaaagaaaaagctgccggaagaaaagtgattatgatcggtgacggtattaatgactctccggctttgtccgcagcagatgtcggcattgcaatcagtgacggagcagagatcgcaagggagattgcagatatcaccgtaagttcggatgatctgtatcagatcgtaaccttgaagttattaagcgacagcttaatggagcgtatcaaaaagaactatcgcagaatcgtaacttttaattccatgctgatcgtgcttggagttgcaggtgtgatccagccgaccacatcagcactgctccataacagttctactttactgattggactggagagtatgcagaatttgttggattaaaaagattgtaagaaaaatcttgacgtgaactatacttttggggttatcatataggaataaaatggatagttataaaactcaagatgtgagttttgtaattatctggaaaacaaggagagagcaattatggagaaatcaaaagtatattttacaacgtttaaggcaactggaaatgagaatctgcttcagaaacttcaccgcctgatgaagacggctggatttgaaaccattgattttaaagataagtacgcagcaattaaaattcacttcggagaatatggaaatcttgcatttttacgtccgaattatgcgagggttgtagcagattatgtgaaggaacttggcggaaagccatttttgacagactgtaatacactttatgtaggaagcagaaagaatgcattagatcatctggaaactgcatatgtgaatggattctcaccataccagacaggctgtcatgtgctgatcgcagatggtttaaagggaacagacgagacacttgtgccggtgaatggtgagtatgtcaaagaggcgaagatcggttctgctatcatggatgcagatgtattcatttccctgacacattttaaaggtcatgagatggctggtttcggaggaacgattaagaacatcggtatgggatgtggttccagagcaggaaaaatggagcagcattgtgaaggaaaaccgagtgttgcaacggaaagctgtgttggctgtggagcatgcagcagaatctgtgcacacggagcaccaattattacagatcacaaagcaaaaattgaccacgacaaatgtgttggttgtggaagatgtcttgcagtctgtccgaaagatgcaatttcagcagattttgctgattccgttgcaatgctcaactacaagatggcagagtacagccttgcagtctgtcagaacagaccatgtttccatgtgtcattgatctgtgatgtttcaccaaactgtgactgccatgcagagaatgatattccaatcattccaaatattggtatgttagcttcttttgacccggttgctttggatcaggcgtgtgctgacctctgcaatcaggcagcgccaattgagaacagcgtacttggaaaaaatattgcgcatgcacaggaacatcacgaagattgtgaccacgatcacttccatatgacacatccggatacggaatggaagagctgtatcgcgcatgcagtgaaaattggacttggtacaaatgaatatgaattggaaactatctaaccggagtttaacttatgaactgccgcttacaggtggtggcttttgaaatcgcaatatctgctttctaaggaccggccgctcccaaaatcctgaaaacaaatcagttctattttttatttatcctagattgtgcagcatgcaatctcccagttgtgaaaatctgtcaattcatgttacgagcggcagaacccaaagatgaaactccgggaggtgtgcccttatcatcgatgaatcacaagacattgaaaatgactgcatttagtcgtttcctcctttataggaactcatcccataaccgtgagttccataacgtaaattgcagattttgtggtgcggttcatagcgtaaattgggcatgtataagcgtcctctcactagtcattcacagcgtaaatgaaagaaaaacggtacagacaaatatgatttcctttgtgagccatggagataagactctttagaggcttatcggaatgctcggcgaacaggaacatcatatttcgtctgtaccgtttttcttttcataaacctataaaatcacgactagtgagaggacgcttatatctgcccttcacaccctgtaaaagcaccacaaaatctgtgatactacgctcgttaaactccgggttagtttgcaattacaactccattttcgcagtcaacttccacataagcgcttgtctttaacacatccaatgcattttttgctgcgataagcactggtatatcaaggcttaaccctgcgattgctgcatgacagtttgtatcctctgcttctacgatcagcgcagatgcctgacgcatctgtgacatcatttcattgttggtgtctgctgcaacgataatgtcaccatctttgaagctttttaaatcttctgcgctgtggcatacacaaagatttccggaaattttctttccattcagtccttttccagttacaaggatgtgtcctgccacctgaactttgataaggtttgttgtgccggatacgccaagtggtactccacctgtcagaacaactaactctcctttggaaacaaatccagcctgttcagccacgtctactgctttttcaaataactggcttgcatcctgttcctctgtgatgaggattggttctacgccccattcaagatttaactgacgacagactttttctgtcagacactcgccgatgattgtgcagttcgggcgatatttggaaatcattcttgcagtacgtccggattttgtcacggtcacgattgctgctgcacttaaatcgcctgccatagtgcaggtagcgtgtgagattgcatttgtgacatccgggttgcacattgctttacgctgtctgaatctctgtaaataattgatatcctgctcggtacgggttgcaatacgaaccattgtcttcactgcctcgatcgggtacatacctgcagccgtctctccggataacatgattgcacttgttccgtcataaattgcattggcaacgtctgtggactctgctcttgttggtcttggatgtttcatcatggaatctaacatctgtgttgcagtgataacgatttttcctgcctcacaaacttttttaatgatcattttctgcattacaggaacatcctctaacgggatttccacacccatgtcaccacgggctaccatgataccgtcggacacgcggatgatctcatcaatattgcggacaccctgcatattctcgattttggaaatgatcttaatgtcctcgccacctttttctgcaaggattttacggatttccataacatcctctgcggtacggacaaaggaagctgcaataaaatcataatcattttctaccgcaaaacagatatctctgtaatctttttcactgataaatggcatcgtgaggtcaacgtttggaacgttcacaccttttttattggaaatcacaccatcatttaacactttacagacaatatctcttgcgttgatcttggtattcactggttttgcaaccggtttgatctctacaacttccagtcctaccaggccatcatcgatcagaatgtgatctcccggtttcacatcatctgcaaggtttttgtaagtgatagacacacgctcatcggttccaagaatatcatcggttgtcagtgtaaaagtctgacctgtctttaactctgtttttcctttttcaaattctacgagacggatttccggtccctttgtatcaagtaaagctgcaacatattttcccaattctttgcgcagtttgcgaagcatttttaatcttcccatctgctcgtcatgcggtccatgcgaaaaattgaaacgtgcaacgttcattccttcttcgatcaacgatctcatcaccgcttcattgtcggtggatggtcctaacgtacagataatttttgttcttcttgtcataaattcttcctttctttttatggtttcattttttaagtattcctgcttcctgctgatttttattcattcgaagtgcgtatgcctctcctgatttctgttatagttttaacaatctccctaaatcagcacggagccgacgaaccagtctctgcaaaacttaaaacttatacacttttcacaataatacagtctcttctttccgtttttattcgtattcttgtgaaaaatgtataataaattttaagtttcttctttggtacggcgactccatctacggagagattatacgaaataaacataaaaaaagcaagctttcttttgtaaaaaaaacctgctctttttgtaaacattatgttaaaaattttatttcgtgatcatagttcccataccgccatggatattagatccatctttgttcagttttgtgatcagaacagatctgatcgcagaatcaccgatgaaatcaatggcagcttcaatcttaggaagcatatcgccctctccaaactgtccctgttccatgtattttcttgcctctgcaaccgtcatggttgataaaggtttctcgtctggttttccataattcaggcatacattgtcaacacttgttaaaatgacaagcatatctgcgtctaaaagttctgccagttttcctgctgcaaggtctttttcaatgactgcgctggcaccctttaagttgttgtcctgcattaatacaggaataccaccgcctccgcaggcaactacgatctgatctgcatctgataatgctttgatcgcatcaatttcaacaatatccattggctttggagcagcaacgattcgtctgtatccgtcttccacttttacaacgtggtttccttttttctcctctgcctctgcttcttcctctgtcagtacacgaccgatcaccttgcttggtttgtaaaatgcctcatcatatggatctactacaacctgtgtcaggattgtagaaacggtcttgtagattcctttgttcaataattcagcgcggatcgcattctgtaaatcgtaaccaatgtatccctgactcatagcagaacatacggacattggtgttgcggtatattccggatataatttacaaaattcattcatagctgtatggatcataccgatctgtggtccattactgtgtgtgataaccacctgataatcgtcacggataaaatcagctactgcttttgcagttctctttgtagcctctttctgttcaggaagtgttgttcctaatgcttcatgtccaagagcaatcacaattttcttctttttcatctctaccatcctccgatgccttttctatttgcagagcactcggaaagcatctccgggtgctgctatctctcatagttagtgtatcctattcaaaaacgctccagcaaaagtcagaaaaacctgcggtttttctgactcgcgggcgcgttcacatgaaacacatccgtccaccgcatgcaagcatgcgtgtccgtattgtttcatgctcacttttgccttcgcgtatattttaccatgaacgttttccctgcgcaatgtcaattttcatcaggattccgcctgctcttttgcaatatcatccggcgcattttcctctgggagacaacattgctcgatcacctcccacagttcatcccttccctgctttgtctcagatgaaaatggaataataactgtgcccggttttaccttaagtccttcacggattgccttgacatttttctggatctggctgcgcttgatcttatccagcttcgtagcaatgataatcggtgcaaatccctgataaaccatccagtcgtacatcattttatcattggcagacggatcatgacggatatcaatcagtaaaaagaccgcctgcagttttttggaagtatggagatagttttcaatcatttttccccatttttccttctcgctggctgaagtcttcgcatatccataccctggaagatccaccagatacatggcatcattgacattataaaaattgattgtctgcgtttttcccggctgtgcggaagttcttgcaagcgatttgcggttcaacaacgcattgatcatggatgattttcctacatttgactttcctgcaaatgcaacttcgttcaacagattgtccggtattttacttgtaataccgcagacagtctccagatttacacttctaattaccattattttttcccctatatattgcagtgtgcagaccgcacaccgcatcctacctatatttaacctatttctgttccttcacaaatgccacatccagcacatctttcatctgctccacaaacacgatctctaatccttttttgatctccggtgaaatctcgtcaatgtccttctcattcttcttcggcacacagattgtcttaattccagcgtttttggcagccagtgtcttctctttcagtccaccgattgggagcacacggccgcggagtgtaatctcgcctgtcattgcaacatctgcacgcaccggtgtctttgtgattgcagacagcatggcagttgccattgtgattccggcagaaggtccgtcttttggcactgctccttccggaatgtggatatgtatatcattttcctgaaaaaatttcttcggaatatgatattcctcactgacagagcggatataactgattcctgcctgtgcagattccttcattacatcccctaactgtccggtcaactggaactcaccttttcccggcataatgttgacttcaatctccaatgtatcgccgccaacgcttgtccacgcaagtccacgtacaatcccgacttcgtctgtatcgtttttcttatcaaaactgtatttttctttgccgaggaacttctcaagattctgctctgtgactttgatcttctctttgtctccttcatagagcggtcttgctgcttttctgcagatctccccaagcttacgctctaaattacgcactccggcttctcttgtatagccgctgatgatcttcgccatggctttgtccgtgattgcaagctgctccggtctgattccattgcgctccatttgttttgcaagcagatgttccttcgcgatatgaagcttctcgttctcggtgtagcttgtcacttcgatcagttccatacggtctaataacggtcttggaatgtcctgcactgagtttgccgtggcaatgaataatacttctgaaagatcgattgggatttccacataatgatcccggaatttcttattctgctctgcatcaagtacctctaacagtgctgacgctgtgtcacccttgtaatcactgctcatcttgtcgatctcatctaaaagcatgagcggattttttacaccggcactgcgcagcccgttcacgatacgtcccggcattgcaccgacataagttcttctgtgtccgcggatttctgcctcatcccggactccgccgagactgatccgcacatattttttatccagtgcctttgcgacagaacgtgcaatacttgtcttaccagtgcccggtggtcccaccagacagatgatcggactttcgcctttgctcgtaagattgcgcactgcaagaaattccaacatacgctcttttactttttccagcccatagtgatccgcatttaaaatctgctccgcatttttcagatccttgttgtcttttgagttcttattccatggaagctccaaaagtgtctcgatatatcctctcgccactgcactttccgaagaactggaactgatattcttgaaacggtcgatctcttttttgatcttctcttttacctctttgtccgctttcagttttcctaacgcggctgtaaactgttctgcgtctgactctgtattatcttccccaagctcctcacggatgactttcatctgttcccgcaggagatattccttctggttcttatccacatgcgccttgactttcgcctggaaatcattcttgatggctgtgatctcgatctcctttaacaaaagtgccatgagaacttcatagcgctctgtcaaggaaacagcatctaagatcttctgtttttctgcaaaatgtaccggaagactgttggcaagctgattcatcagtttctctaaatcggtgatctcacctaactgacgctgcagttctttccccattttcggattgaccaccgcgtactttccaaacgtctcctgaatactgcgaagcattgcctctttcgcttcttctggcagtccgtcatccacttcctcgtcaaatcgtatgatctccgcaagcagatagtccggattttcaagaaaagcggacaattctgcccgctcttttccttctaccaaaatgcgtacaatattattttgtaacttaattacctgctttacctcggcaatgatacctattttatataagtcttcgattgcaggatcttcctgctccacatctttctgtgtcacaagaaaaatcttctgttcatccatcatcgcttcttccactgccttgatggattttgcacggcttacgtcaaaatgggctaccattcccggcagaattaccattccgcgaagggcaactgctggcattttcataatcattgtatccattttttaattcctttatctgtaacagcctaaaaaatgctgtcatcttttccttaagaagcctgttctagcttctcaacaagttgtttttcttctttttcctcaattgcaaggtttttctctacatcctctttggtgatctcgcatctggtaatgctctcatccgatggaatgtgatacatcaaatctaaagtaactgcttccatgatcgcacgtaaaccacgggctcctgtctttctctcaagtgctttgtctacgatcgcctccaatgcatcctgatcaaattccagtccgacgccgtctaattcgaacagtttcttgtactgttttaccagtgcattcttcggttcacataaaatacggatcaacgcatctttgtctaacatatccaatgtaacagtcaccggaacacgaccgataaattcaggaatcagtccgaattttacaaaatcctgtggaagcacatgttttaacacttctcccacattgtactcatcccttgcatgcacctcggcattaaatccgatagatttctggtcgagacgtgtctcaatgatcttctctaatccgtcaaaagcaccaccgcagatgaataaaatgttggtggtatcgatcgggatcagttcctgctgcggatgttttcttccgccctgtggtggaaccgaagcaaccgtcccctctaaaatcttaagtaacgcctgctgtacaccctcaccggaaacgtctctggtgatggaaacgttttccgatttcttggaaatcttgtcaatctcatcgatgtaaatgatgccgtgctgtgcgcgctcgatatcataatctgctgcctggatcagttttaaaaggatattctcaacatcctcacccacataaccggcctcagtcagtgttgttgcatctgcaatggcaaatggaacattcagcaccctcgctaacgtctgagccagaagggttttaccggaaccggttggtccgagcataagaatgttactcttctgcagttccacatcggaatctgctcctgccataattctcttataatgattataaactgcgacggataatacttttttcgccttgtcctgcccgatgacgtactcgtctaaaaacgctttcatctcttccggcttgatcaggttgatctgctcagcagattctacctgagttccgtcaaattcgtcgttctctaactcctcgtcaataatctcggcgcaaacatccacacactcgtcacaaatataggcaccgtttggtcctgcgatcagtttgcgaacctgatcctgcgtcttaccgcaaaatgagcagcgcagtctctcgtcatttcttcctgccatttttcattctccaatgttcatatttcttcctgcttttccaaaaagcagcctctcattgcccctgaatttctattagcggcttgtgatcacattatcgatcagtccgtattccattgcttcctgagcggacatgtaatgatctctctctgtgtccgctgcgatcacatcatatggttttcctgtgtttgcagctaaaatttcatttaattttttctttgtctttaaaatgttctctgctgcgatctgaatctcggttgcctgaccttttgctccgccggatggctggtggatcataatctctgcattcggaagtgcaagtctcttgccctttgctccgcctgcaagtaaaaatgctcccatgctggctgccataccgatacagatggtagatacatcacatttgatgtactgcatcgtatcataaatagcaagacctgctgttaccattccacctggggaattgatatataaatgaatgtcttttccaggatcctcggactctaagaaaagtaactgtgcaacaacaaggcttgctgttgtctcattcacttcttctccaaggaaaataattctatcttttaataatctggagtaaatatcgtaattacgctctcctctgcttgtctgttcaatgacgtaaggtactaaactcatatctcttacctgccctttccttttcataaatatggttggaatcgcactatgattgaatccacacttttttcactattgcaatatatcggtcatacactgcactgataaatattatcccacaaatgcagagacgttggaataggaaaaaaacatgttttatgaaaaattaatatcttgttcgaattttcaaaaaatattgaacttttttctcaacaaatccactctgtcataaatctcaaacagaccggctcataagagccagtctgtgatattcataacctgcacatgcacgcattacgtgcaatctgctactgctgtgcaccgccggaattattcttctgttccttcttctgcttcagcttctttttctttctttgtcttagcttttgctctctcttttacgttctccataattaagtcaacagcttttgtcactgctaaatctctcttaatggattctttctcagcatctcctaagtactcttttaacttgtcagcttccattccgtactgagctgccatcttctcaatttctgcattgatctcatcttcagaaacttcgatattctcatcttttgcgatctgctctaatacaaggctgctcttgatacgtgtctcagcttctgggcgaacctgctcttttaatccgtcgatcgtcatgccggagaactgcatgtactgctccatggaaagaccgctctgtgcgattctctgtgcgaactcgttgatcatgttctcacactgtgtctcgatcatagcttccgggatctccattgtggatttgtcgatgatcttcttgattgcttcatcttcttttgtacgttttgcttcgttctctttctcaacttcaagatgttttcttaagtcttctttgtactcagctaatgtatcaaactcagatacttcagaagcaaattcatcatttaattccggaagttcttttgttttgatctcgttgatcttaactttgaatacggctggttttccagctaaatcagctgcctgatatttctctgggaaagtaacgttaacttctacttcatcccctgcattgtgtcctactaactgatcttcgaatgtatcgatgaaagagtgggaaccgatctctaatggatgattctctcctttacctccttcaaatgcaacaccgtcaacaaatccttcgaaatcgatgactgctgtatcaccgtttgctactggtctgtctgttacagttacagttctggagttcttctgctgctctttctcaagtgctgcttctacttcttcgtctgttacagttgtgtcaatcttagttacctgaacacctttgtattttccaagtgttacttctggtcttactgctacttctgctgtgaagatgaaaggttttccagattcgatctgaacaacgtcgattgttggtctggaaacgatgtcctctttgctctcttccatagctgctgcataattatcctgaattaagatgtttgctgcttcttcataaaatacagctgcaccgtacattttctcgatcatagctcttggaacttttcctttacggaaaccagggatgctgattttgttcttctctttcatgtaagcagcctgtaaagctttttctacttcctctgctggtacttcaacagtaagttttgccatgtttttttctaatttttcaacctgtacactcattataatgattttcctccttatatatataaaatatccatgtacatttcacgcttaatgcgctaatcgagccacgtccaaagtcgcataaacccgcggtttttctggctctgcctaaaaatgggcgtactacgactatcgcagtcattctaggattatagcacacacttttgcaaaataccagtgttttttatggttttacgaggttttctgcgatttctgctcttttgccatgcaatttatcatatacgacattacaaaccactgtataaagagaggccgtcacattgatcccggttcgaagcagcagtgccatcggcagtccgaacaatgaagctgcaattgcaagtgctccaaacgtgttaaaaaccgtctgccatttatatccggcagaatagcccacgccgatcccgccaataattccgatcatacttcttcctgactccggcagtatcagataaaagacgagaaacagtgcacatccgacaatattaaacactcctctgtccacagccctcatttttccatcctctgtaaatggaaggcagactgacatacatgcgatccctgcccacattgctctcggaagtccaagcagcgaaacgatcagcattgcacttgagacgatcagtgtcagtttcagataccattgatttctcgcagaccggacatcaaattcccggaataaatccgtaaatgtcctgcggtaaggtctgtttttctgatttttataaaaaactgccatgcacacaagcatccccgccgtaagtccgatcacccgcatctcaaatgctctgccactcacatcatatccatataagagcagatacccgagcacaaacgtagaatgattatgcataatgacattgtggcacccaaaaatcataagaagcaggatacagacacaatttataaaaaatgctcccaccggagataccatatttgccagtcgcgggccagccatcatgattgtaaacattccaacaatggacagcaatccatgactcgtccgtataccaaaatcagcctgtctcagcacaagcagtgccaataggaccgttactcctgcaacgctgttttcctgccctgttaattttgtatacaacgtgacaactgccacacaaaaagccataacaagatatactttaaaattataaataagaatatgacgccatttttcttttttgtctgtcgtatttttgatcaactgttttgaaccggcagaactaagctgtaactcctgataaaatgtcattttgtagtctccttctcttctcttttaaatctgcaaagcgaagagtactatacttcaaaacatagagtctggcaagtataaaacctcattttagaaaaattttggaatgtttacttttttttcatatagaaatattttccgaacagacttgatttatgctaaaatgtgattatccggaaaggtctgtacaaatgaggagaaaactatggcagtcacaaaatccaacgaaagaacaaaatatgagctggcaaatgccatgaaacactgtatgaaaactgcacctgtagaaaaaatcactgtgaaagaaattgtagaggcatgcggtgtcacaagacagactttttaccgcaattttcaggataaatatgacctcatcaactggtattttgacaaaattctcttagaatcctttgaacatatgggggaaggaaaatctgtctatgaaggtcttgtaaataaatttacctatatccaggaagaaaagctgtttttcaaggctgcatttaaaaacgatgaccagaattgtctgcgcgatcatgatttccagttgatcaccgctttctatacggatcagattgaaagccgtaccggcaaaaagatttctccgcatctgcaatttcaattggaaatgtattgtcagggttctatcttcatgactgtccaatgggtacttggctgccggaaatgcacaccggaggaactggccagatcactggctggcgctatgccggcagaattgagtgatgtattccgtgatgttggactaatctaaaccggagattaactggggaatataagcagtcatgctattatgaccttccaacttaacaaaaccagcagcagtatacaaatccacttcttccctattatctacatcaacaaccaccatcatttgatttggtctgtttaattctattgcgtttgccaacaatgccagttcatagccttgagacaccacttcaggctttacatacaatgcatagatttcattaatatcgtaacaactttgaacatccaaatacccaagaacctgttcatcttttactgcaagaaaaactctaaatttatctaaagcagaaacaatacgcttagcagtccaatacgtatcagtattatgaagatcatagtactgcttcatccacctatctgataatgtttcaatattactggttgatacattaggcacaaatccaccttgaatcattttcatttgttccggttcaaatatcgctcccttcaacttcaatggtttataaattgccatattttgtggattaaacacaaaatccatctgatatccacaataattcctttccatatattcaagcatttcaataaacgcttcttcttccttggtaaaccctataagcatctcaacatatctatcatctggaagaacaataaagacaaaaagccctttagtaattccattttccaaaacaacataagcatgcttatctttagactttaatgaacaatatagattattcttatcgtaagtaaaatgaggatctgaatattgaggatgtttagctaattcattgacaaacccctcatattcatcaaacgaaaatatcttttgaatcatcatttacacctccactagcatcatttcttatagttatataaacatgaatttgtatcacagttccttcttgagaattattttttcttctgttcggtattcttccacaaatccatgcttcagaaaaagtgtaatagcgaggttgtcaattgcaatatcatcgtagagaactgaaatcccattgtttttcgctacgaaacacagcagatccaacgcctcgcttccatagccctttcttctgtatttcgaatatatgataacatcggctatctcatgctgtgtttcggcatcgtagtgatacgcaatttctccaacgaattgaccatcttcattttttaggtaccgataataccgcttgtcctcgtggcaagcgatccaataattgtaccagccgctccatttatcctccggccaggggattgtcccgccccacgcatgattgtaggacatggtatcttcatcggccagcatcattttccgaaaccacaagtcctcatattttggctcatataaagtaagcatccttacctcctgtaaattccgattgagatttcacctgttttaaatcatttttgctattttcgcaataagattgcaaataaaacgattagaactaatccaacaactcgattaacttatcaagaaatgcctcttcctacaactatctacactgaaatttgaatcactatttacttatgcttcatagtacctgacaccttgtataattatgaactcagtagtttgtactattctcgtaaccatctacagatatcaaccacttgcactcctttataatcataaatttcatgatgtgttcttgcaattatcatcttaggatatgcatctcttattgcaagcaacggtgaatattctctttcaaatgttttttcatctgaaatattatcgcttacctgaatatatatttgagcctcacgtttctttgctacaaaatccacctcctttttataaagttttcccacatatacctcatatcctctcctacgcaactccaaataaacaatattttcgtaaactcttccaaagtccatgtttcgtgtaccattgactgcataacgaaacgatgtatcacaaagataatatttactattatttgccagatattttttcccttttaaatcataacgttttgcctcatagaacagaaatgcattttccaaatacccaatgtattttgacaccgtctttctggttatctcgctctggtcattttttaaagttttgctgatattattaggcgaaagtaaattaccgatgttatccatcatgaattcagatatattagtgaactctgatttatttcttatcttatacttttcaaccaaatctctgataagaatggttgaatacacatccctaatgtaatcatactgtctgtcctccgtcttatatacataagatccaggcataccaccagttcggacatactgatcaaaagcttcatcatacctgtctgtaattccataataagttagatattccacgaaagaaaatggatatacttttatttccatcgttctccctgtaaaaagtgttgctaaatctgagcttaacaaaaatgcgtttgaaccggtaatataaatatcataaattccttttgtataaatactattaattgcaagttcaaactgcgggcatagttgaacctcatcaatcaataaaacattcgtcattccctctttgtactgatccaagatatacttatgcaatgcatgatactccaacaaatgatcaaactctaattcctgaaggtttatcataacaatatttaccgtttcctctaatgactgcagataagagacaaactcttgcagcaataccgatttaccgcttcgtctgatgcctgtaattacttttatatctggtgtcccatacaattcaatcagttcatctaaatacttttttcttgcgataatctgcatggcaaaatctcctattcccattttttgaataattttcatttttcggtaatatatttcatagactgatattatcacactctgcgcattctgtcattattctattcccacttttttaaaattattcattttttggtattagtttttaattttgatttcctagaaatttcccgtactcttccaatggaaaaagtggaaattttctctattaccgttattatgcaattttattctaatactttgatcgaatctgtctgtcaagtctacagtataatggttttcaatagcagcgcctatcgatagcgaatcacaaatttccacaatacgtttttcatcttcaatactatcaaatggagttttctgatttgtattaagcactactataagacatggtgcttcttccataactctaacagtattctctgcatccggtatagcaaatgcccattctggcataagtttatgagtgattttttctgactttattccctggcacataacatcaaccagcttagacttttcttcaccttgatatacaataaatttccaaggctgtctgtttttggcagatggggcaagagtcgcactgtaaattatatcttcaattatttccttagtctcttggctgcataaaaaatgcgtaacagacaaaatctgttacgcaataaaagtctaactttttggggtcacctcatgaaaactttggcggttacttttgtaaactataaatttcagggctaaccgtctatcggtagcacttttatataattatactaacattcaactgattccatgtcaaatatatattctgttgtattgtggtaataagtgtttaggcaaccagaagttatttgcccagatgagcaaatatatttttacattctgtaaaactaataaactcccattctggagccatcttgtgaagatgttcagtcaaaacagttaaggcttcaaaagcatatccttgtcgatgatatttataagaaaaggtatatccgagagaaaatatatgatcctttggcataacaactattcttcggcgttcaatcaaacttacaattccttcatagtcttttacctgtcctctctgatatcgagcacatatttcgttatttctataatcaaatattacatccacatcattttgcaatacatttcgaagatggagtctttttgtatcaatggaaatcatctattgtttcccctctgtaatttcaatctatttcgtttataccattttccttttcataaacctataagatcacgacttgtgaaaagacgcttatatctgcccttcacaacctataaaagcactgcagaatctgcgacactacgtcacctaaactccggtttacatcaatttacggaacaatgcctttaagtcctccacacttgcatcttttggattacctggtgcacacgcatctgcatgtgcagactcagcaaggaagtctaaatcttcttctttcaaagcttccagttttgttggaataccaacatcgatggataatttctgtacggcatctactgctgctttgcggtactcttccacagacatatcatccacaccttttactcccattgcacgggcgatctcacgatatttttcacctgtgcattctgcattatactccataacgattggaagcatcatcgcacatgcaactccgtgtggtgtatcataaactgcacccaaagtatgtgccatggaatgagcaattccaagtcctacatttgagaatcccattcctgcaatatactgtccaagtgccatgccttcacggccttctttttcattggcaactgcacttcttaaagatctggaaataatttcaatagcttttaagtggaacatatctgtcatttcccatgcagcttttgttgtgtatccttcaatggcatgtgtcaaagcgtccataccggtagaagccgttaatccctttggcatggaagacatcatatctggatcaacaattgcaatgatcggcatatcatgtggatctacgcagacaaattttctctttctctcaacatctgtaataacatagttgatggtaacttctgctgctgtacctgctgttgttggtactgcgatgatcggcacacaaggtttctttgtaggagcaacgccttcgagacttcttacatcttcaaactccggatttgcaatgataattccgattgctttggaagtatccatggaagatccaccgccaattgcgataagataatctgcaccggattttttgaatgcctctacaccatgctgtacgttttcaatggttgggtttgctttgatgtcagaataaatttcataagcaagaccatttttatcaagaacatctgtcactttctttgtcacaccaaatttgatcagatctggatcggaacatacaaaagcttttttgaaatcatgtgcctttgcttcatttgcgatttcttcaatcgcacctgctccgtgataagatgtttcgtttaacataattctgtttgccataataactcttctccttttttcaatctgttgttaataagttttcgaaaacggaaatccattaacatacataccctttttcccttgtatgttaattttttcacattttctacatcctattgtaacaaaagaatttagaaaagataagttacaaacatctaaaaatgtaacaactattcatcaaacctgtaccatcagcacgccttctttccctgccggaagttcttcttttatctgcccatccaaaaaacagacggcaccgccttttgccaattcttcttcatttccactgaaacaaactgaatttacaagtaaaacctgcccgccaattttcttgctttgtgcggcatactcatacttcatttccgtattccattctttcgccggaaaatctgtgtatacaggccagagcaccacatccgctcgaagtttctttatctgcatgacatttttctcatcccacaaatcgccgcaaagaccaattgaaaatgtttttcccagatattcaaattttgtaaacatatctccttctgcgtaatgttcatccgcaaaagattccctccagccttttgacaccctgcgaaacagatttaaaatatttccatctgcaccgatggtaagctgactgctgtaaattttatcctccgctttctctaggaatccaaaagacactgccagtgcattctcttctgctgccttccgtatcatctgaatattactgtcagagacagataatgccatatgctgatctgtttcatacttccagtccaagacctcaaagccctgtaaaaaggtttcaccaaataaaatcagctccgcttttccactgttttctttcagacattttaaaattttatttctattatattctatatcccgctcataaaatccaactgctgccagtgctattttcatttacatatttcccttttttcctcaaacgaaaactccgtcacgctgcaatttggcactccaaatgccgcatactcctcatttgtcatatccgaaaaataagacttcgccactcttgcaatcccattatgtgccacaaggatatacgttttatccggctgtgccttcagttcatccaaaagtccataaatccgatgtgccacctgaaacatggatttcccatttccataacggttcaaaaactctttcttcgcctccagaaactcagccgaattgcgtggcgaagttccctcccagataccaaagttctgttcaatcagtcgtggctccatatgtgccgggattcctgtcatcccactgatatgttttgcagtgtctgccgcccgaagcagtggagaatataaaatttcatctgccttgatcccctctgccacgatctttttcccggtttccaccgcctgttcatgacctctcttcgtgagcggaatatctgttcttccgcaaattttgtctgctacattccattcgctttctccatgtcgtacaaaatacaatttactcatttttctgctcctgatgctattcaatatttaaataaaaatagatgtcactttttccttcctgcttcgtccccttgtaaacctgcgtattgaatccgccaatttcaaaaccatttttcaggtaaaaaagatcggcagaaagattgttgtcctgacctatcgtataaatgccatgatatccgttttcgagagcaatctttttgccttcttcgatcagcattttcccaatgccatgtcccctgtggctgccattcactttcaggtcatccagatacagataatcgaaccagtcatttttatagacggcaagcccgatgcatgttccctgcccatcatatgcccctgcaaaaaaatactcacttttcatttcgtcatagttattttcaaaatcaggaaaacacatttcatactgcttttcctgtggtaactctttcgtctgataagaccatgcttttccatcgaaaagtggagtcattctcccccagattttaaatggttcattcagcagatgaatgtctgatttattttcttcggtaattctttggattgtatacattataaaaatctccctcattttttagaaatcaaaaaatttttgttctgtgtgcctgataatttcatcccagctctgcaaactgtgccatataaagcttataataagctccttttttctccatcagttccgccgggcttccctgctctaaaataccgcctttgtcaatcacaaaaatacggtctgcattctggatggtcgacagacggtgtgcaatgacaaaactcgttcttccggcaagcagcgcctcgatccctctctgcactaaaatctcggtgtgcgtgtcaatgcttgaagttgcctcatctaagatcagtattttgggcatggaaaccattgttcttgcaaatgcgatcagctggcgctgcccgatggaaagtcctgctccgtgctctttcagttcagtgtcatagcctttttccattttcatgataaaatcatgtgcgttgacagccttcgctgctgcgatcacctcttcgtcggtggcatccagttttccatataaaatgttgtctctcactgttccgtggaaaatgaaattatcctgtgtcatgacgcccatctgtctgcgcaggctgttcatggatactttcgtcaggtcatatccgtcgatcaggatttttccctgctcaatatcataaaaacggctgatcagattgacgatcgttgtttttcctgcgcccgtcggtccgacaagtgcgatcgtctcacccggtttcacgacaaaattgacatcctctaacaccttcgtctccgccggtgttccccggtcataggtgaatccaacatgtgaaaatgtgacttcaccctttacttccggcaattctttcacatcttttgcatctgtgatgtccggttttgtatccaaaatatcaaaaatcctctctgccgctgtcaggtttgtgaccagattattgtaaaagttactcagattcatgatcggattccagaacatgttaatatagcttccgaacgccactaaaagtccgacggatactttttcaaacccaaggaaacggatgccgaccagatatagcatcatcgctccgattccccagcagaagtcaatgaccggtccgaacatatctgcaaaaatgactgcatccacaaacgcattgcggtgttcatccgtcaggttctcaaaaatttcttttgtctcgtcctccgcaccaaaactctgcactacattcatccctgcaatgtcctcatgcacgtaggcattgaggttggatgattttttacggtaaatctgccatctcttatgagatattttctgcaccagaaaaataccgacgatcatgaccgggatcgtgcttaaggatgccagcgccagacgccagtcttttatcatcatgatcacgacaacaccgatgacggtgataaattccgggatcagagtcgtgaccatattcgtcaggacatctttcagtgaattgacatctccgatgattcttgcaagaatttttccggtcggtctgctgtcaaaaaacgagaaagataacgtctggatatgctcatataaatcctgtcggatctttaataatattttattggaaatcacggacatactgtacattcttacttttacgagaatgataaaaagaacgttcagtgcgagcgcaaaaattccaagtgcgatcagtcctttaaaatctgactgcgctatgtaatgatcgatcgcctcttcgatcagcaatgggtttaccagtgagattcctacggtaatccccatacagaccaaaacgccggcaatcgctagtttataatctaataaataggaaagcagccggcttaaaatcttctttttgtcggtgttttccatatattcgtcttcacgaaatgaattgactgccatgatagcctccttctgtgttatattgaaatcaggtcaaaattccagcgaagccctgccttcgctatatgtgtcattttatatttttatttccagcttctgcatgacatactttttaagatgccagataaccgccgtactgtgccatataagtgtcataatacagtcccttctttgcaagaagctcttcatgtgtgccgcgctctgcgatcctgccatcctgcagataaatgatctcatctgcgtggcagaccgctgaaatgcggtgtgcaatgatgatcttcgtcgtgtctttcagactgtttaatgtcttctggatctcatgctcggtctccatatcaagagccgaagtggaatcgtccatgacaagaatcgggctgtgttttgacaacgcccgtgcaatactgatccgctgtttctgtccgccggaaagtcctacaccgcgctcaccgataacggtctcatactgctcatccattttttcaataaaactgcttgcctgcgcgcttgctgcggcactttttatctcgtccatctgcatcgtgctgcggttacccattttaatattttcttcaatggtatccgagaacaggaacacatcctgtaaaacaacggcaacgcttcttctaagctgtcttaaagatatttttctgatatccacaccatcgagtctgacggagccttccgttgtgtcataaaaacgatgcagcatgttgatgatcgatgattttccggaacctgtcgcccccataattccgagcgtctttccctcttttaccgaaaaactgatgtctgataaaatctgttttccatccagcttgaaggaaacatgatcaaactcaacatttccgctgacatgatctaacgttacaacattccggctatcctcaatttccggtttcacctcatatatctttttgatttttttatatgatgcgactgcggaagacaggtcatttgtcagccatcccatcatttccattggccaggtacagtttctgctgtattctacatatgcgaccagtgcacctaatgacatatttccattcatcacagaaattcctccaagaatggtaattgccaccggaagcacttttccgacaaactgaaacagcggataataccgcaccagcactttggactgtgtgatgttcagattgtaatagcgttcattgtgggacaaaaattttttgatctcataatcttcccttgcaaacgcttttaccgtgcgcacacctgccagattttcctctgcaacagtggtcagcactgcattttcctcgctgatatcctcataaactttatccaacttacgctccatgataattgccaccacagcgcagcagagcatgactgtaaccggcaaaaatgccattttccaattcagggaaaacatgcagtataaaacaaataccacatggatcgtcacctcgatcagcaacattcccacataacctaatgcattctggattttatccacatcatctttgactctcgccatcagttctcctgtattggtatcgtcaaaataccgcatggacaaggtctgaatgtggttaaataaatctttccgcatctctgccccgattttcgaggacagaaaatcaaacgtaaactccttacaataaccaaaaatgcttcgtccgattccaacgagcacgattccggtcaacagcttcgtcagaatctccatctgcccgcctaaaataacgtcatccacaatcttctgtgtgatcttcggatataacatatctaacgcaatggcagtgaccatgcttgcaacggcaaacacatacccataccagtaacgcccgatataactgcttaacttcttcataatacctccttgttttttcgaagaaaaaatgcgactgcccatgcaggagcagaggtatttatcctccctagttttgcgaagcaaaatctaattttacaaagtaaaatttaccctctggtgaggagaggattttacctcccttgttttgcgaatccccggtaaacaaaaagcgctccgcagtatcttcaccacgaagcgcatttatccgctgatctgtcttaaaacataaaaagtccgtggcgaattacaccacggacaaaactttccttcttataacatacttctgttatctaagattcttaccgaggtaattctgcatatgattttgtaatgttgtgtgaaatgttgtaaactgaatcatatctttacctctctttcttcgtattttgcagttataaacgtcacaaatatgacatcctgattccctgcaatttagcttactaaactaataaatcataaaataaataaattgtcaatacaataaaataaatttgctctctccttcaagcaagctcagcagttataacttttgcaaaacacttcttgaaccaccaaagtatgagattgatattgtcaatctgatcgtcattaccgcatatgcatccgtgatctgctttgaaaaataagggattttgattgtttttgttatttgttaatttcaattgacttttttttacctttactgtattatctaattattaaagaaacgggttttcaccgtacagtctatgactcaagcgggccattcgtttctttttttattgttgtaaaatcataaagatatttttttccatcttcatcatgtcttactaacataactgctccaaaaatgttatatcgctccaattctccatcattattgtacactgggattccaaaacgcacgttatatctataccacccatattttgcatctttttcgtgttttgattctttattctgctgccagatttcttttacaggtgttgctatttgtattaattctggaattgcctgtgcagcatttgccttcgcaactcttcttggtccttttaatgtaattctgctatctgaattggaatattcatctgggaaatctgtatctataaaaattttttctgaacaatatgctatctcatagaaatcacccacatactcctttaaataattctcaacttctttccagtcagcttttgacaatcccttaaattttttatcattaataagaactatttttttaccttctgcatcctgaataatagaaacattccttactttccttttagcagactgattcttttccaaacctaaatatatatcattaaaatattggaatactcgtcctttaatatcatctggagatgtaagcattttctcaattgttattttttcatccgaaatacagtttgatgtcatgattgaaacgttgttttcctcttcctcacacaataactctgcaagtgtcatatccagtgctttacaaattggaaccagtttatcagcctgtggattcatccttttctttctccaatcacttatcgtactggtagctatccctgttttctttgataattctgtctggctcatatgcagtaattccagtctggtaaaaattttttcataaatcttcatatttctcttctatctttccgatttgtcggatattttatcataaaaaactcaaatttgcaatcttagaacattcatttcagcaacactttccaaatatttccaacatatttttttgaatgctgttcataatagaattaggacaaacaacagcggcttgcttctgaatcgtcagcagcaatgacgctgctgcactcctaaaataacacaaggaaaaaatatggaggtgaaaccatgagcggatctaattcaggttctaacaccagtaaaatggctgtaccacaggcaaaagaagccatgaatcgtttcaaacaggaagttgcaagtgagattggagtacctttaaaagaaggttacaatggtgacttaacttctgcacaggctggaagcattggtggtgaaatggtcaaaaaaatgatcatgaagcaggaagaacagatgaaaaactagccattaggaaaaagccactgcacatctttggtatctgcctaagatctgcggcggctttttatatttattatgtaaaccgataaactgatttcataatgagatctctttttgtatattctgtgtaatgactacgcttcttcaaaattgcggtaaacaattccttttttcacatgtccgacaacttcctcgtcaaattctgtcagacactccacgattgcaagtccaaaatcaatggccgttcccataccacggcttgtgataatattaccgtcaacgacaacggcatcctcgcttgtgatcgccccggtcagtttttcctcaaatcccggatgacaggtagcatgtcttccctctaataatccggctgctcccaacacacttggtgccgcacagattgcagctacgatttttccctctgctgcaaatttttttattattttattcacaatatcacttgctccgagatttaatgttccaggcattcctcccggaagaacgattgcatcaaatccttcaaaatctacttctgatgcaagtgtatctgtcaaaaatgtaacgttgtgagaacttgtcacttcttttttatctgtgatagaaatagttgtcatctctaattttgccctgcggacaatgtcaacaacggtcagtccctcaatctcctcacatccgtctgccataaaaataccaacttttttcatgccgtttatcctccatttgttatatcgtgatttcatcactcaataatttcgccgttcgtcaaatacaaataaatttgtattttcctctctttcgctcattatatcatgtacaaaacctgcggtttttccatgcttgcagtgcacgcacgaaaaatcaaagattttccgggttaccgggcattcgccctcctcgaagcggaagaaacacaatcctaactgccagcagtcgaattgtgtttcctccgcttcgaacactgctcattgctttcgcacattgtatcacaaatccagttccagcaaaagcctaaaaacgtaaatcactacttccttattgcaaaatcacttttgctcatctatgatagagtcatagataattacaaaactcatagaaaacgtgatgtatgtttcgcaatacctatgtgatagagtaaaaagaatggagatttttatggaaatcgaacgtaaatatttaattgataaacttccggaaaatttggatcaatatgaatgtaaacagattgaacagggttatttgaacactgatccggttgtgcgcatccgaaaatccaacgataaatataccttgacctacaagggtgccggtctgatgtgccgtgaagaatataaccttccattaaacgcagaagccttcgcacacttaaaggaaaaaattgacggaatcctgattcaaaaacgcagatatctgatcccgcttaccgataaacttacgatagaattggatgtttttgaaggggaacttgcacctttacagcttgccgaagttgaatttgagacaaaagaagaggcagaacattttgttccacccgcatggttcggagaagatgtcactttttcctccatatatcacaatagtacgcttagcaaacgctaggcgtactattttatttagtttacataatttgcaaacatctttatctgaggcgattgctctcataccgttgtcttgtacgcagacaactctttaactgatcgtaacggtcatcaagatccccttccggaatcacaacgtccaatgccaccgccaatgtgttgatcatctgatcgtctatttcatcccgcagtgcaaccagaatattataacgctcgtcaaagtcatccgaatctaaaaattctaaaactttcggattgatgccaccttcaaaatcgtcctgcgcactcaaagctgcctcttttccttccactctgtcactctgctgccactgcgcttctgttatctgatctgcacaaactagcttctgtgcctgcgattccgtggtctgatctgtgtacgcccatctcggttcttgtgcttccacctgatccatgtacacttgtttctgttcctgtgctctcacttccgcatctgcaccgggttctactttctcgaaacgatacttctgtgttacttccggatacttctcatgatcaacctcgctgacaaacatttccagtggtcttgcatatacgccataatctccatataacgcctgataaatcacaagctgctcccctgtttccgaatgttttgccacggtaacaatctgatataatttatttttaaaatgccggtaaaattctccgcttttcggtaattgccgcacgctgattcctcttttctgacgcaatttatgtaaactattttttaatgaactgcataatcagaaatctataaattatttccaaattcctgatagctgttcaacatatccacgccttctgcaataaaatccctgtcaaattccagattaccactatagcccatgatcatgagatcgttcaatttctgcatgatatcacagtcctcatcaaaaccggctccaatctgctgtccgacaggctgtaccccctgcattgcaacttttgcactcggtgtcagtatcggtgtctctgccgcccctcttgctgcctcatgctgcattctatccgcatctttcaacaaatcttcatcattttcctgaacattctgttttgcacggcttaaaatatcctgatttttctgtggacgtgactgcgctgttcctctatttgtctgtgaccagggattttgcaccggacgcccggacggctgtggcctgtatggctgtgcccctctgtacggctgtgcctgtcgatttgactgtgcccctctgtacggctgcgcttgacgattcacctgcccggctccataggtctgcggctgacgattcacctgcccggctccataaagctgttggcggttattctttaccggttttccattgatatatgtagtattgtttcgatttgctccctgattctgtgccttcacctttgatacgatcactgcgatcacaataataataaatatcagttcaaacatatttcacccttctcctatccatgacaacatttgttactcatacaaatattataatagtttctattttctttcacaatacttagttcttgcaaatcaattggtttatcatacaaccagctcgccggacacacaacaacaaactattacgaaactaatactgctttctcctgaagtactttataaagcttttccacatcataatccggcgcatattgttcaatcgcatcataaatctgttgaacaagcgttggcgcttcctctaacatatccgctgtttcttctgccgtacaaccttttcgatattttttaatcacattctctataattttttccgctgcgccttcatttcttcctttctctcttgactcacgcagatcatccgcaaatagttcccgtaatgcctcacacatttttcgctcctcctttaattctttccagttggcacgcatgatcgtatctgcaagtgcctgatataattttgattctttcttttttccatactgctcaatgaagtttcgaatttcgccacccgactttaaatcattgcgcagattctttaaccaataattattttccttcgacaatttaggaatgacaataagctggattggaatggaatcacctaacagatagtaaataccactctccacatttttgattgtcaagtttttctcatattccagcttttgtagcatttttaccggataatggtaacatacaaatgtaatgctcagctccgttgccggtatctcatctacgccacctgtttctgatttataaagacatgcgtaaccataagttttgtaaaaatcatcaatatttaatttgtcatccggcgatttgtactcaataatattgtactgccggaaaatctttccaatattcttttggatttttacgtccttcttattctttaccaacacatcaatctgcattggtttctttgaaagcaaatgttccggctcaaattccagatactccgcttcatcttccagctcaatctgcaatgctgcgtcaaaggctggatgccattgaattttgtcatcgtttgtgttcaatcatttcccccctttatcataattgaaatagttttgtttttcaatgcataaggaatatttttattatgaatgcccataccttcgaaaaggcaattcgatcgtaaaaacaaaaatctcatgcattgaaaatgttcatcaaaatggaatctcgtgccgaaacggctgtgaaacttgagatatattccttcaccagaaaactgattttggatttgcagacaggaacgataagaagcacgcagttcttatgatgattctactaattactgcgtaaagttttgtctgcgactttgatgtgatctaagtataaaatacttcacaaaaaatgtcaatttcaaaacgacatttcaatataatattgtaaacagccaaagtcaattaacgcaatatcgcaatcccaaaaagcccaaagtacccatagaatccccataggcaatatgttaaaatatcattaaataaatctcaattgtgtaggagaaacgacaggatgacgaatgtaatcattaaagaagcaacgccggcagatgcgcaacaactgatagcatatatgaatatcattggtggtgaaacgaacaatttgacgtatgggactgagggaatgggtatttcaattgaagccgagagacagttccttgaaaacctaggaaatgatccgcatagtgtattttactgcgcttggaagggcgacaagttaatcggaactgctaacttgagtggtatgccaagaagaatggcacatagagcagagattggtatttctgttttgaaagaggaatggaataatggcataggtgcactgctaatgcagcatctcattgaatatgcaaagaatcatggaatagaaatcataaacctggaagttcgtagtgataatgcagcagctattcacttatatgaaaaatttggattccggaaaacaggaacaattccagcattcttcaaaatcggcgatgaatatattgattttgatatcatgagtctggatatgcgataagcagggcacttatcagggttctttcacaagtcattcacagtgtaaaaacaaagcgttgctttgcaactctttgcgcgctgatgcgcgcaagctttagcttgcataattcttctgcgcatcagtcgcatccttgtgaaagaacccaaattctactcctgataaatcttaatgatatccttcaccacagcgatcagtttttcataacgcatcgaagaagtatccagacaaaaatcataatttcttgcatcattccatgcatgaccagtatagtatttgtaataatctgcgcggtatttatcaatctttgcgatcttcttctccgcctcctttgcagagatgccattctggtcaacgacacgcctgatacagtcctccaatggtgcgtagaaaaataaacggatcacatccggattgtcttttaaaacataatctgcacagcggccaatgataatgcacgactcctgtgcggcaagatctttgatgacctttgcctgataattgaaaagattgtcatctgatacaaaatcactgctttccggtggaagtactccacctttatatggattcttttttaagatattgaacaggagtggtgactttttcattttctcatccacttcgccaaacaatgcctcattgattccgctctcgtcagatgccattcttaagatttccctgctataacagttaatgccaaggtctttcgccagcaaattgccaagtgtcttaccaccactgccgtagcttctcgcaattgtaattacagtttttttcatatccttcccagcctttctgcaattctttccttcagtatacacctctctgtccaaaaagtgtatctcttatccacatttacatagtccgttattcgccaagatatgcctttttaatggaatcattgttcatcatttcctttgcatctccggacagcacaatattgccggtctctaatacataggcacggtctgcgatcgcaagtgctttttttgcattctgctctacaagcagtaccgttgttccacccgcagaaatatcccggataatatggaaaatctcttctacaagaatcggagaaagtcccatggacggctcatccattaaaatgatcttcggttttgacatcagcgcacgtcccatggcaagcatctgctgctcaccaccgctcaatgttccggcaagctggttttttcgctcctccagacgtggaaagctcttgtatacacgggctaaagtctcctcgatctcttttttatcttttctggtgtatgcacctaatttcagattttcataaacggataattccgcaaacacacgtcttccttccggcacatgtgccattcccatggatacgatcttgtgtcccgggattttgctgatatccttgccctcaaaaataatctctccggctttcggctgaagcattccggtgatggtctgtaacgtagtggtctttccagctccgttggcaccgatcaatgcaatgacttcgccctcatttacttcaaaggaaatacctttaatggcctggatcacgccatagtatacttccagattttttacctcaagcattgccataataacgtcctcctattcacccagatatgccttgataacctgtggatcatttaatacatcactggtttttccctgtgctaacacctgtccgaagtttaaaacggtaagttcctcgcagattccagaaacaagcttcatatcatgttcaatcaaaagaacggtcatgtcgaactcatcccttacaaaatgaatggtttccattaactcttttgtctcatttgggttcatacctgctgccggttcgtcgagcaataacaacttcgggtttgttgccagtgcacgggcgatctccaattttctctgtttaccataaggaagattggatgcaagaaaacctgcctctttatccagatcaaacactttcagaagttccattgccttctcattcatctctgcttccactttgcggtattttggcagacgcaggattcctgtcaatgtagaataaggcatctgattatgtaaacctatttttacattatcaagaacagactgctctttgaaaagacgaatgttctggaaggttcttgcgattccttctttattgatctctgttgtctttttgcctgtgatatcttttccgtctaatgtaatggttccgtcggttggtgtgtatacaccggtcagcatattaaaacaggtcgtttttcctgcaccgtttggtccgatcagaccatataactgtcccttttcaattgtaatgttgaatccgtctaccgcacgaagtccaccaaaggagatcccaagattttttacctctaataatgccatattatgctgcctccttttttgctgactttttgaattttgctgcgatacgctgtctcatctcgatacattttggtgcccagttgaaaagcatcattgcgatcagaacgatggaatagatcaacatacggtagtccttcagtccacggagcacctctggaagcaaggttaagatcacggctgcaatgatcgatccacggaaacttcccattccacctaatacgacaaataccaggatcatgatagacatgttgtatccgaagtttgtcggtgttgctgtaacggtagaaagattatgtgaataaagcacaccgcctgcacctgcgatcgctgcggaaatggtaaatgccatcagtttgaactttgtgatattgataccgacagactctgctgcaatccggttgtcacggattgccatcaccgcacggccggttctggaatttacaaagttgtatacgataaataaaatgaccaggatcatgatgacaccagctgtaaaactggataaatggggaatttttgcaattccctttgctccattgatcagccagataccatcttcgcttaactcgatcttatttccatccgagatagcaaaatggaatccattctcatcttttgcaatatataaaacattaatgacatttttgatgatctcaccaaaagcaagcgttacgattgcaagatagtcgccacggagacgaagcaccggaataccgatgaggaatccaaaaaatgctgctgcgacagttccaactgcaattgcaatcaaaaacagaatcacttcattctgaatgctgtcctgtaacagttttgtgcagaatgcactggaaaatgctcccacacacataaatccggcatgaccgatactaagctcgcccagataaccgacacagaggtttaaaccaattgccacgatcgaataggtacacattggaacaagaagtccctgcatcagggaggacatgttgccggttgtgatcatagtctgtacaattatgtaaaccacaatgaccatagcaaatgtaatgatatgatcttttgtactttttttcattgttttcaaatttaactttgccatatctgccacctacactttctcatgaacctgtttacccaaaattcccgaaggcttcacaagaagcacaatgatcaggactgcaaacacgatcgcatcggataactgggacgagatatatgcgcggcctaagatctcgatcacaccaagaaggatccctccgatcaatgctcccggaatggaaccgatccctccgaatacagcggctgtgaacgccttgataccaggcattgcacccgtatacggtgtcagtgtcggataagcggaacagaacagtacgcctgctaccgctgcaaggccggaaccaattgcaaatgtcagggagatcgttgcatttacattcactcccattaactgcgctgcatccttatcctcagatactgcaagcattgcctgaccggctttggttttcttgataaaaagcatcagtgcagccatgatcacaacgcacgccagaaatgtaacaattgttgtaccggagattgtgagtgctccacctgccagtttcaatgccggaagtgttacaacatttgtaaatgatctggtgtcagcgccaaagatcagtaacgctgcattctctaagaaatagctgacaccgatagcagtgataagaactgccagaggcgctgcctttctgaggggtttgtatgcgatcttttcaatcacaatgccgagtatggtacacacgataatagaaagtaccactgccgggaccgctccccagccctgtccgctcattgtcataaagacaatatagcagcctaccataataacatcaccgtgtgcaaagtttaacatttttgcgataccataaaccatggtgtatcccaatgcgataattgcatagacactaccgaggctgataccgttgatcaggtaggataaaaaattcataactacacctctgtctttctgttaatttactacgttaaaacattactttttcacatcaaggattataacatataaaatacctgtatacaatctttctgttaaaaagaaggtgtcatacggcagcccaagccaccgttgacaccctctggggaaactggatcgcccttattttcgttgtatcattatcgcagattacattgctgtataagcaccgtctttgatcaccatagccttcggagctttacttacttctccggtagcttcccatgtcatgccgtcacctgtcagaccatctacagaaatctttgtcatagcctcagtcagagctgttccgatatcagatacgctcatatccggtgtaacacctgcttcctcgatcgcagctttgatcgcataaattgcatcatatgcatctgcaccgaactggtttggtgtatcgccgtaaagctctttgtattttgatacgaatgcctgtgtcttctcgtcatctgcatctgcaacgaatggtgttaataacattaagccttctgctaaagatgtatcaaagttttttacatcaaggataccgtccataccatcacatccgaagaatgtcggttcatatcccattccgtttgcctgatttaaaatgatagaagcctctgtgtagtagattggaaggaataccagatcagcgccttcactctgtgctttctgtaactgtgtggagaagtctgtcttggaatctgctgtgaaagcttcctctgcgacaacctcaaatccctgatttgctgcttctttgacgaatgtagcttcaataccggatgaatatacatcagagctgtcatagataacggctacttttgttgcaagattgttctcgccaatgtactgtgcggaagctgttccctgattcgggtctgtaaagcatgcctggaatacattgtcgttttcaatgacatctgtggaagaagcagatggtgtgatctcaaacataccatcttctgctgtcttatctgcaactgcaatacatggagttgttgtaacagttcccatcagaacctgcataccccagtcttttaaagagttataagcattgacagatttctctgcatcattctggtcatcttctgctttgaattctacctgatatccattgataccgcctgcttcattgatctcatctactgcgatctgtgcggcattcataactgcggaaccataaattgctgctgcacctgttgtaggtccgataccaccgatcttaaatacgcttccatctgctgcgctgtctgtagaaccgctctccgttgatgctgcgctgcctgtgcttcctgtatctgcggatgatccacatcctgcgaatgtgccaactgccaatgcagctgctaaaaacatactcactgctttcttcataataatcctccttgtttgcgaagcaaatccaattttacgaagtaaaatttttcctctgagtgaggagaggatttagcctcctttttgaaaagcaaaaattaaattttattgagataatttaattttttcttctcaactttctttttcttgtagagaatcttatcaaattttaaatttatgcacaatattcagaatcacctaaattatcgatgtattttaacactgaattatgcaacttgtactttataataacctgtagttatagtctttatgttcgcatgtcataacgagctgttttttcatattatgtaaaccttttttttgcattcttaccatgcgtatacttatccttaaatataagcttatgcgtaaatataatgctggatcatctgctctaatttttctccgcagcccgcataattagcttccatagccagcgattccatcagatgttcctctaaataccgctctaaaaagctgttgcggaattcattttccatctctccgactttgctctcttcctcatgctgtagataatatgcgagtgcaaaaaaattgggtgaccgccattccgatgtatcctccagcaatgcctgcagattttccaactcgctccgcagcatgatcagattgatcttgtccatatttgccgccatattttttaatccctctgccgtggatttaaaatcgagatcatcctccctgatactgcactcatggaaaatccggtccaaatgtccgtttaacctgtcaaggtctcttttcacgtcctcgatcgggatctcattcatatcttccatcatattgatcagactgcgccttgcgattgccatgtgctcctgcgaatccacatacccctgccgcaggtttcccccaagttccagcgcatcttttaattccttcgtctgtacgtcgaccagctttttatctaatttgctcgctaataattctttgcggagttcttttacctcacgcgtcaactctgctacacgcttctgttcttccgttttttctccgaaaatcattgcaatttttattcctttccgtttgtcagccatcctgattcttagcttagtataatccaagacaacaaaacaggcaattgcgaattaccgcaactgcctgcttatgatctgctattactgtcaatgaattacatcaacttttctgctgtatattgtacgccgtctttctcatataaatctgacagattcagattgctttccgtgtaatacagcacactgtccttcccataaattgtttcaatcccaagattggtcagatttttgactgcttctgtatccagcgtatcagcgatgtaaaccggacttaccttcaaagcaagttctccacagctgatgtcgtccgcataaactgccatattattgactgcggacttacacagtccgtctgcggtatcaacataacgtgtcctgatatcaccgctcttaaattcataataattatatttttccttatccgacatcggataattgtgcagactgacaatgctttctgccccgttataatgcatgacaccagcaggataaataatattcccctgcctgtcatatatattaaaagaataatccgcattttcctctgctgtcctggaagtttccggaccggcatttaattttgtaagtgcagatgtcagatccagatttctcgtaaatccatcatagcttgtcagcgaacccagtgtataaccgttctctatcatgacatccgccacataatcagtaatgaaagcgtttttcatccacgaaaaatcaatgaaatccgaaatataattcttctctgcaaaagcaagataatcgtcggatacagacaatcttacctgattgtcgccaagcagttccacgttcaccttggacggatcattgctgtaagcagccacctctgaaaaataagctgccacttccccattctggtaagcatcatagttaactgtctcggagtcatcattacagaaaaacagattgtcatattctgtatacacaggcgcaagataaattgcccggttcccggtctctgcgatcagttcaaaagcatggtataatgcatcatccacaagcattgtctcattcgggtgctggttgagatcatacacgtttgtgatcccttcaaatgattcatcactgctgaatattttataggcttttacaatggaatctgtgtagagcagcgtcagcgcttttttttctgcggtggcatttacgcccgctgctccgacataatagcggaagataaaatcatctccacaatgaatttcagcggatgaactcgcttcaatgtttgtccatccgctgtcatttgacatcaatccattcagtgcatacataaatgcacctgaagcaatcacaagcaacacgatcactgcaatgaatctctgtcttgtatttttctccgaaagttccacccgctgcacaggtcttacattcggagtatgatttcgattgccacctctgacggttctccccatatcttaaataaacactgctgcaagtgctagcaggaacaatgcaagaatgactgcaatcacaataaatcctgcaatggcaccctttttgcacatcttgtagttacgataatgtctgtgtttcttaaagatcatcgctgcaataataccgatgaccggaagtaagaatgaaagcagtgcataccatgtgcttcctgtgtcgtgaagtggcggaagctgaatctcatcatgtgcaacattgtcatgatgttcctctggtctcggcgcatctttgtctaaaatcgtaattgtttttaaaggtacgttcttctcacgcgtagctttgtattcttcaatctctttcttattaccgaatacccagtgatcatgaccgatacagactaactccggtttgtctgtactgtaatcatgaatggatggatcataagtaaataacaccttatttttctctaactgcggatctggaatcgggatcgcagagatcagagaatgtgtgtatggatgcagtgggaagttgaataactcttctgcatctgcgatctccacaatatcacccttgtaaataacggcgatacggtcagagataaatctcacgatagaaaggtcatgtgcgataaataaataagttaagtctttctctctctggaactttttcagtaaattcaatacctgtgcacgaattgatacgtccaatgcggaaattggctcatcggcaacaacaagttccggttccataaccattgcacgggctaaaccgatacgctgacgctgtccgccggagaactcgtgtgggtatctggtcagatgctctggcagaagacctacctcattgatcatctcctctaccttgcgcacacggtctgcctcattctcatataaatggaagttatacagaccttcggatacgatgtaatcgacagttgcacgctcatttaaggaagctgccggatcctggaataccatctggatgttacggataacttcacggtccagggatttcgggattttcccggaaatacgcacacctttgtacaaaatctctccgtttgccaatgggttgacacggatgactgcacgaccaatcgttgtcttaccggaaccggactctcctactaatgagaaggtttctcccttgtgaatatcaaatgtagcattttttacagcgcggacggcattttcgccttttccgaatgtaatatccacattttttaaagataataatacttctttaccattttcatcaatcggaccatgctctggtaaatgagaagcatgctcctggttttctgtgtttcgatttagtttagacacgatctaaatctcctatatattgaatgctttaacaagtttctcatgaatgttctggattccttccggtttttcaacctttggtgcatccgggtgtaacagccatgtttttgcataatgggtatctgttactttgaacattggtggttcctctaaggtatcgatcttcatacagtatgggttacgcggtgcaaatgcatcaccaacgatactgttgtaaagtgaaggcggtgtacctgtgatagaatacagttttgtgtttctctcagcaagctgtggcagggaagaaagtaatgcccatgtatatggatgacgcgggtcatagaatacctcttctactgtaccaacctctacgatctgtcctgcatataaaactgcaacacggtctgcgatattggcaaccacacctaaatcatgtgtgatgaatacaattgtataattgaactctttctgtaaatcctttaacagttttaagatctgtgcctgaatggtaacatcaagcgctgtggtaggctcatcacagattaagatctttggctgacaggacagtgcgatcgcgataacgatacgctgtctcataccaccggaatactggaacggataatcatcaaaacgtgcttccgggttcgggataccaaccttgtccatcagatcaagtgcacgaagtcttgcctcgttctcggtacaatcctgatgtttcatgatgacagaggtaatctgttttccaatcgtgataattgggtttaaggatgtcataggatcctggaatactgtagcaatcttcgtaccacggatctggctccagtctcttccatctttgatatttgcgaggtttaagatacatgttccatgtaatctctcactgttctcatccagatattttacgcggaatgtaactttatcaaaaacagcatttctctgctcttcatcattcagatccacgccaagctgcattgcctcttttaatgcatccagcagtgcattgttctgtttcatacgcttacggaaaccaaaacgtccgacagaaagatatacctctttcgcaaggatctcatttcttacttctgtctctgctgtgattgctgcactgacttccttcgcatgttttgccttaagctctgccatcttcttatcaaattcctgattgtatgcagtatcatgtgccagactgtttgcacgctcttttaccttctgctcatgctctttctcgaatgccttgatttttgtatccaattcggagattttctttccagcctctttgatcttatccttctctttggatggatcgtaagtctgtttcaagttgaaggtattcgttctctcatgttttaactcaaggagttctttttcatacgcttctgcttcttctttgctcaaatctgctcttcttctcttctcagactctaactcaagaatcgctttataagtgtctgcaccaaactccagtctggaatactcgtctaattttttcttattctctgcgatgactttctttgcattgtcatttaattttacgacagtatcggaaagctcttcatcgctgaaaataatcttgccgttatcaatgaatccgttgctgtctaacattcctgcaaatgtttttgtaaaaacagatttaccagaaccggactctcctacgatcgcaatggattcattctcataaatatccagtgacactccacggatagcagtaagcaccctgcccctcacgtggaatttcacgatcaaatcttttactgataataatacttttctatcttccatctacctaacctctacatgtgtgttctcggatcagatgcatcaccaaggttctgtccaacgacatataaaacaatcgtgatgatagaagcaacgactaccgggctccagaactcgaactgccagccaggggtaagcatcgcactttctgactcgtaaatcaatctaccaagtgacatatctgacatacccataccgatatatgctaagaacacctcataagaaatataggaagggatctctgttgctgccagtgttacaataacagatgtcataaatggaagaatattcttcattgcgatcttaagtgtactcgttcccagacatttggatgcaaggttgtactctctgtcacggatgatcactacctgtgtacggataaagtacgcaattccaagccatccggtaatagtcagcgccagtaccatggtccagaaaccagctttaaacaacataaccataacggcgatcaataaaatgtatggaatgtttgcaagaatgttatatacctcctgcataaaaacatccactttctttgaaaatccccagatagatccgacaacaacaccaacggaaaggttgatcgctgcacagataaatgcaagggaaatggagatccttgatccaaaccatacggcatcgaatgtggactgtccggctgcaccggtacctaagatccagtgaatgttcattcccagacgttcgatcgctgcagatggtgacaagtgtttggttgtcgcatccattaagttaccaaacttatcatattccacaaataatggataaaggtaagtaaatgcgatcaacacacccagaatcgccaaaataataatattaatctttttcttaaaaaatacacggaatacagaatgccaataagaatatcttggcgctgtaatcttttctgattccagatcactgtggtctaccggagcgaataattcttcctccggcataccgaacttttctaaatcctgactcatttctaattacctgtcctttgttgagaatgaaattctaggatcaaccattgccattaggacatcacctaaaataagggatgtgactgttaaaatcgcatagaacagtgttccaccgacaataacaccattatcatatttgttgatagcctctgttaataagttaccaatacctggaacgacatacacacgctctgtgatgatcgctcctgtcaatgctccaagcactgccgcagggattccctgaatgatcgggatcgctgcgttcttcaaaatatgtctggtgaaaatctcaccctctgtcagaccaccggatcttgcgaatttgacatagtccgaattcatctggtcgatcatataacgtcttatccacttcatcagatttgctatggatggaagtgctaacgatacgatcggcaatatatacatcagcctgctcggcgattccatatcaaaggttgtcggcaggccaaagcttccaccgatcgccttgaacaggaaaatatacgcaagtgatggtactgcgataataaatacaatataaagcgtaccgatcttatcgaccagtctgtccttctttctcgccataaggatacccagcggcacaccgatcagataagacatgataactgcgatcagtccgatcacaaaggaataacccactttggattttcctgttttgtatgttgcaacattggtatagtcatcctcataacggtctgcatacaataagctggattctctggaaccctgcatataggttgcagtgtgcagattgtccgcactctcctccacaagaccggttggataggtgacagttgattttatataagatccctgatggcttgtcatcgtactgaatacatccactccctgatttaccgtataggatgttccaagattgatcgtcacaatattctgatgaacaaacggaaacttggaatcaaaatacagtaaatacttgtgtgttgtaccattgccaatgatcgccggtgagaatttttccccaccatagacaggatcatgtaacgtaaaggtgagacctctctcacctacgatgtcttctacattattaatatcatcaattgttattaaatttgcaaaatattttcccatacgggatgccaatgggacatctttatacgcaaaaagctgctgctggccaccgtcggcatacttcttcttgttcatcatgacggcgtctttgcggactaccgtgtatccctgagacttataatactttgtgaattttttgacatattcactgacctgctcagaatcctgtgccttggttcttccgaaaccaaccactgcagatcgctcttcctctgttaattctccactgcttacaagttcattcagccagtcagagtaggtgacataatccagataaccataatcttcccatttagagtatttataggcaactcttgcattattacttgtatgtgaatattttgtatcccctgcaaaaacaaggtttcggtctaacattgtgtagatcatgatcatgaccagcgccacaacgatcacgatagacaccagtccatgtaatatacgttttaataaatattttgtcataattgttcactcatcaatagtgcaggggagcggggaatccccgctccgatgcagtgttgttatttcgtagatacgattaataaataccgatagatttgatcatgtatccggcatattctggctggaatgtatccagataagatgcaggatcaccatagtcaggaccccatccggataagtcacagaagtcatagttcatttcgtaaccatagttcatgtaatatccgctgtagtaccagtctgtgttatctgctgctgcaattaagtttacctggacaagtccctgtgtagaagcttcgatagactgtttcagagagtttgctctgtttgtaaatacttcactggaagaagcatatacaacatccatctggattgggttgtcagcatcgatcgtaagaccatctgctgctaactcttctactgcctgactcatttcttcccaggagttatctgcattgtaccatccgtcatatccgtcggaagaaccggcaccctcgttagctgttggatcccatactgtgatcttcacgccgtcagcatcgatctgatcctgtacgatctgtccatagtatgttccagccggatatgttttttctgttccgttgatatcaactgttacttcttcttccaaagtaacaaagttacccggtgtgtaagagtttctcatagaagcatatttcagatcatcaccaacctgctgtgcaagataagcaccacgatccaagcccatggcaagtgctctacggaagtggacgttctgcatagcctgttttgttcttgcagcatcttcctctgtctgtgaggaaactgcttttgttgtatcgtttgcgtttgcaaactgattacggttgatattaaagaatccgctgtatgttgttgcatcagtaagtgctacatatgcataatcatcaaagtttccatccgcttttgctgctgcaacagaagctgtgttaagacctgttccatctacaacacctgcgattgcatcgttatatgcttttgtcgcatcagaaccatcattgtatacccatgtcagtgtatggatattgatgtgatctgcattccagtaggactcgttagcctggaatacgattgtgttcttggatgtaaagttcttaacaacatatggtccgcaatatgcgatagaatcagaatccttaccatatgtgtaatctgctgcatccggatcatactcaacaccaaacttaccacccatggattcatagaaggatctgttcattggagcaaatacgttgtaaccgagcattgttgtgaagtatgtgcaaggagcttccagatcatactctaatgtgtaatcatcaaccgcttttacaccgacctgtgagaagtctgttacttcaccggagatgtactgggatgcatttgtgatgataccttcgatcaggtactcaagaccaccctgggcatccatcatatgctgcattccggcaacaaagtcatctgctgtcacatcagcaacttttctgccctgggaatcaacccatgtagcacctttgcgaagatggaatgtgtaagttaatccgtcatcagatacttcatagctctctgctaatgcaggctgtaaagttccctctccatcatactccattaatccatcgtatgtgttcacgattgcttcagcatctacagactgagaagttgcaagaatatcccatgtggtaggatcctgtgtatataactgataattataagtatctttgagcgtgtaaccctgctcctctaagtaagattttgcccatgcttcatactcacctgttccttttaactcagcccattttgctctcattgtgctgacatcggaagctttgatcagctctgttgtgacaactgcattatggtatctgtccatatcgttgccccacagtgtatagtcaaatgtgtaaggagctacacgtgagatggaatagttaccaccctttgactgtaatggaagcataacgcctgattccattaactttgcttctgcgattgcttcaagtgcaaatttctcagaaacggtttcagcttcatcagctttctggtaagctgcccaaaaatcaccgagttctttgtcatacagctctgcagatacttcttcataattagccggagctactgcttcttcgctgctgcctgattctgtaccggcttctgtgtcttcgacagcatttgcatcatctgcggcattgttcttattgccacatgcagtcatgctgactgtcatagcaagtacaagcataaggcttactacttttttcttcataatatttcctcctgtagaaataatctatataaacgcttatgcgcttatatcgctgtaaacgtactgtatatctttcacaggcggacattttcctccggcaaatatcttttgccgcactatcaatgcaccgctttatcgcattaaattattttcttacaaccaaaaaaagtgcctttagacttctctgcctaatgcacttgccagatacaactgtctttggtctgcgtacagtacccttactattatacatacgtctgcggatttgtcaatagtttttgatcttctacatacttcctttttaccgtttttttacaaagaaatccccgaaaatcaaggtttcctgactttcggggattttgttttcctgtaaacaatttctgttattgttcactcttatgttgttccagtaacgttttttttatctttaccagtactttattcttactgtgctgattttgttgcatacatgaagtatttcattccgtatacagttgcataaacacctgttacgttaaatttctgcatataaacatcattgtaatagtagattgggataactgcccatgtattcataagcatatcctctgcctgatgcatcagatcgacacgtgctgcaaaatcagttgttgtacagatctgtgaaatcagatcattatatgctgtccagtctggtgaagaagaaaccggagttcctttaccaagctgcatatcgttgttaccggaatcagatgtgaagatctctaacatgttaactggatcgttgtagtctgcaagccatccttcacgggcaattgtaaagttaccatctttacgatccagtaagaatacgttccagtcttcggatttgatttcaaggttgataccaagtaaagctacatcctgctgtacagactcagcaactgcgatatgtcctgtctgaccaacgttctcaacgatgaactgtctgtcaacaagtaagctgatcgcttcacgcatttttgcagcctgctcttctgtcttaccgtcaaagattggatcatttacgttgaatccgatgtagtatgttccaaggttatctaagataccgaattcaggattgattccgtttaaggaagaaatctcatcgtttggtacagtatcaatataatcaaggtctccactgttgtatgcagcgtagattgctgtatcatctgcacttaacatgaagtgaagttcatccattgttacgttctaacactttatcactctaatttgtatacttgtattataaatggattctgcatttgtcaacaaaaatttgtttatctggaaacaaaacttttgaaggcagcctttttagcaggatttccaatttcaatagaaatacatgcaaaaaaggcagggacaccccagattaggggcctttccctgccttatcacactattcggttctcacttattatctttcagatttctctctgaatctgttacttattaaaagcctttttttcgaatttgtcaacaagatttttgatgcatccatcttcaaacggactcgtgagtcctgcctcgacaattacatttgtaaagaaatctcttgcagaaagattgcaaagcttatagtaattatcccacgcctttttgaaatcctcgtccatcatcactttaaactgcattgcgcacacacttgccagacagtaatcaatataatagaacggactgccgaaaatatgcggctgtttctgccagaatccgccgttgccaaagaacggatcattttcataatccatatgcggacgatataccttttcaagatctgcccagactgccttgcgctctgccggtgtcatttccggtttttcatagacgatatgctggaactcatctaccatgcagccgtacggaacaaatgcagaggaatcctccagatgcattttcagataatcgtcttttctgtcgccaaagaacaattccatccagttatacgtgaaatattccatagacatggagtggatctcagctgtctccattgtaatatcggcaaactcgcggatttcttcatctctcagtagatacccctggaatgcatgaccgcactcatgcgtgatcacatccacatccccgcttgttccgttgaaatttgcaaaaataaacggcgacttgaagttcggaatataggtcatatagccaccctgtcgcttcgtctttcttccgagcacatcaaacagctcgttttccatcataaaatcaaaaaattcttttgtctgtggagacagttcactgtacattttctgtcctgccgcaagaatttcctccggtgttccctttggagccggatttccattggtgaaatacacgtctgtgtcaatataggaaagtttatccacaccaatgcgcgctctgcgctgttcgtgaagcttattggcaaaaggcacaaaatactctttgacctgttttctgaaattttccaccatttccttgtcatagcagttacggttcatacggtaataaccaagctccacataattttcatagccaagctgtcttgcttgctcggtcctgttttttaccattttatcgtaaatctcgtcaatctcatccgtcacagactggaaatattcgctgactgccttccacgcttttctccgcacttcacgatccggacttgtctggaatttacgcatgagggaaagattataaacttctccctcaaaagggatcttcgctgtggcgatcagcttactgtagcggctgctcagtgcattctcctcctgcataagcggaataatcttctcgtcaaaagccttgtttgcgatctcaatatttttaaatgtcacttttccgatcttgctctctaaatagtcacgataaggtgagtcatacagcacttttccatactcattctcgtactgactgatgattggtccgacctcatcatagaaatcgctttccttctcgtaaaattcatctgtcgtatcaatatcgtggcggatcatggctaattccatactcgtctggatatctgcagtgaacttataatattcccggtggatttcaaactgctcctcgccgcttttcgcattcttcgtgcgctcgataatgctcttgtattctttttctacttcttccattttaatgcgcttatatggcatttctgaaaatttcataatgaatgttctccttacttttgcttaccagacaattgtaaaactcaaattcatgttatgaagattgtaataaattaacaaaatttaatctacactttctatgatttttgcaattatctttgatgcttatgtgtctgtgttttattatatataggatattttgattttactatcttttttttgaaaatatattataatgaattatgaaaaatatactagaaatcggagtttcgtatgatcacaacagaagatattttaaatatgaatttttataaaaaagaaaagtttaccggaagttataaaggtatgcgctatcttgtaaaaaaagaaaaagatgacgcagaaaatgatattttccgcgccaccgtctggcctggtccttataattttgcaaccactcctgacgaccagaagctttccgcaacttttccattcaccgaagaaggaaagcaacaggcagtcgactggatgaatgaacagtggagttcaagaaaggaatggggtgttatcatgcactcataaatgcgggtgacaggacttgaacctgcacgtcggggacactagaacctaaatctagcgcgtctgccaattccgccacacccgcaaaactgctttccaagtataacttatttatccataaattgcaactgttttgttgattttaatgataaggtaaaaaatcagacatcggggattcggtctccgcttccgctccggtcgttgctaaacaggcgccactggcgcctagcaacccgaacaactacgttgtccggggttcaagtctctcgctgttcctaagaataagaaaaacgccgttcatacgaacgacgtttttcttattctaatgagacatcggggattcgaaccccggacaacttgattaaaagtcaagtgctctaccaactgagctaatatcccatattaagctgggctagcaggattcgaacctgcgaatgctggaatcaaaatccagtgccttaccgcttggcgatagcccaacaaagaaatttgctgcacctatcgcaacattttcacaataaagcctatgctttattgtaagggtggatacagggattcgaaccctgggcctccagagccacaatctggcgcgctaaccaactgcgctatacccaccataaaagactgcaagcaactctgttgccgatgcctaaatccttgtgtcttcttaattcctaaaaaggaaatgtgctcgaagggattcgaacccccgacccacggcttagaaggccgttgctctatccagctgagctacgaacacatttgctcacatttaccaaattggcaaatggaaagcgggtgatgggaatcgaacccacgtatccagcttggaaggctggtgttctaccattgaactacacccgcataagtcggggtgacaggattcgaacctgcgacctcctggtcccaaaccaggcgctctagccaagctgagccacaccccgaaggataattttcaatgctttacacatcatgagaaactttgttttttgtctctcactcgtgacgcaagagttattatataagagcgcagagaaaatgtcaacactttttttacatttttttcaacttttttgtaaaagtccacaacccttgatttctctggggtttgctcttataaatactcaatttcaaaagttgcatctccttttttatcaatctccatgataatataggacggtctttttccctcctgtcttggataggaaaggctgcccggatttaaggcgatcacgtccttgtgataatcaatgatcgggcggtgggtatgtccgaacatgacgatgtcgaatccccgcccttccgcttcacgctcaatatcttcgattccggtattgacgtaataatagtgaccgtgggtgatcagcaccttatactttccgatctgcagctctttttcccgtggaagtgaagaaaagaaatcgttatttcctgctaccacttccataggacatcctgcctgttctgcaatataatcctcatacccctctgcatctccaaggtggatcagaagatcaaccgggcattcccgctctaacacttttaataaattttcatgttttctgtgggtatcactgatgattaatattctcataagttttcctttgcaagtttttctttcattgcgcgcagcgcctttccgcgatgactgatctcattcttctgttcctcggaaagttctgctgtagtacatccatatttttccacgcaaaaaatcggatcatagccaaatccattttctcctgcaatcttatcccctatgtatccctccatagtctctcttgtgacaagttctcttccgtccggcagcactgctgcaatggaacagacgaaacgggcagttcttttctctttcggaacgcctgcaagacggtctaagatcgcctgatttttgatatcgtaagaagtatcttctcccatataacgcgcggaatagatgcccggctctttgttcagataatccacttccagtccggaatcgtctgccataacaactgcctccggtgcttcctttgccactgctctcgctttgataagtgcattttcctcaaaagtctttccgtcttccacaatatccaatgcgattcctgcctctttcatggataaaagctccacattaagatctgccataatatctctgatctcacgcatttttcctgcgtttcctgttgcaaaaataattttcgtcatctttttaatatcctttcgcaaatgcatctaaaacggcgtcataaacaccttctgccgcttttttctgataatctgtactgtttaaaagtgccagttcttcctgattcgtcataaaaccaacctcgatcagcgccaccggaacttcgctggtccggatgatataaatctcatccccttctaccagtcctttatttttgctctccaatgcctctgtcacatgctccaaacaaagctgtgcaaacgccttgctgccaagctcctttgtatctgactcgctgtacatgacctgtgttccatgtgtggaggacatgcgcccgcttttcgttgaattattatgtatactgataaacaggtctgcctgtgatttattggcaagctgcaccctctggtcaaaagtcgggttgctgtcatccgttcttgtataataaacgcctatattttccccgctctggtcaaaaatatctttcagctgcagcacgatcccaaggtcgatatctttttcattaatgccctgttttgtcgctcccggcgcccttccgccgtgccctgcgtccacaactaccactttgtcatacacttcatgcggtgtcaggaagtcaaaataataataatcgtcgtcataatccatatcaagctcataaacctgatccatggtaatctcgatcagcccgtttcctttcccgactgcataggaaagattgtcgatatggttactgctgcctgtcagcggatcattttcaaaataactgacctgcgtatccggcaattcaatccgaatggtctgtgtcacataatcattcgaaatcgtgatgtcgctgccctttactccttccgggagtttcaggcgaagctgccgcttttctgtatcatctgccacttctgtatttttaattgtaagatcactcatcgtgattttctgttctgcaagttctgcctctgcgatccgttcctcctcacgctccacagcccatgtatgaattgccggaagtctcggcaataacacacacgttgcgatcatgagaagaactgctgtcacagttgcaaacttcattgctttctcttccacgtaaccccctgttaacggtcattactaaatgctttgagacaaatattacagttctccacattttttacattttcccattcaaaaccattggaactgacatatccttcaccgtcatctaaaatgacattggcggtggcatcatctgcctcatattcaatggcaagcgggtgaaccgcatccggcgtactgataaataatactaccgcatatctgtctcctgcatccaatgccacttctttttcaaatgggattgtataataaccggcattactcagctttccggatgccacctgcgtcatattgtttagggatgattcatcctcaaaatttttcaccacataaagctgatattccgaatcttttcctgtcgcgtaaaaacttgcagcctcaagattctggtctgattctgctgtataaacatttgctccataaatgctctctttgttatagccaagctgtcctacccagccacagagatcactctggtaaatgtagtcataattgtcgctgtcctcaattcctgtatacacgacattgtgtgtaccgatattggtatcataataggaaatgtaaaaaattccaccgtcgccaaattcgcttccccagctgttctgacagataaatgcgccgtcgccctctagatccacggaaaaattatctttcgaataactgtcatcccagccgatgatcacaacgtcgtgattcggtttttcggtaccaatatagcagtaggagcttgttctgcggtcataatacggagatcttgactgcgaacttttcagtgcattgtaaatagaagtctgcactcctccgtatttgaacacagcctctttgatcttctcataatcttttccgtcaatgatctgcatctcctgcacatgttttactgctgcaagatccggatttgtctttccgtcgccatacggatcatccttttctaacaccggtcccgtccacgaagcaagatatgccattcccattgtatactcgccaccgtcatcctgcgtcaggttaaatccattgttcagtgtcatatgatccacggaaaactgataggtctgctctggcagaagaaccgattccatagcgctcaatgctgcaaacgaccagcatgttccatatgttccctgattgcggatcattgaaatgcgcgcccggtcacgaagatcatattttgtcgggatgatcgttgtgctctccgacacatctgctgcctgcgccttgttttcctgaatattccatgtgtacgaatagtccagataattagacaggtcattcagactcacataatactctttatttttcttcatcaacggcgaaactactttttccttttccccattcacctcgatcgtatcatcattcagggaaaaggaaagttcactgttatgcttttcaactagcagcgtatcttcattatagatatgcgcactgcaatttaacgcatcccttaaaatagaaacaggaaccataatatccagattcgaatccatgaaaaactggtatttttcattcgtgtattccttattgtcgatcaccaccgacaaaagtccttcattgacgctctgtgcgatcagcggattccacgttgtctcctcaagctgcgccccacggaaatgattcacggtctggtattgttccccgacattattaaattttaacaaaagtgcaactgccagcactcccgtgaaggcaatataacgcttcgaatacttcatgtagccctgaactctccttaattacgctttttaggaggctttggtcctaaaaactgataaaaataggtctttaacataccattgtatattttccggtttttgtctgcttttcttccgatgtacttctcgatgtccgcataactggtgatcagaaacattgaccacgaatctaattttgcaaacgattgtccgatctctgtatacagctttggaaggtctgccttatcctctaaacgttccccatatggtgggtttgtgataataaatccgtactttttcgggtggcttaaatctgcaaccgcacgctgctggaaatggatcatatgatcaactcctgcccgctttgcattctctctggcggctttaatcacctctccgtcaatatcatatccctggatatcgactttcaccgttgtgtcaatcatatcttccgcctcttttacacactcataccagagtttgcgatcgatcaggtttgtccattcttccgctgtaaaatcgcggttcattcccggtgcgatattcgcagcgatcatagctgcctcaatcgggaatgtaccacttccgcaaaatggatcgaccagaatacggtctttccgccatggtgtcagcagaatcagtgatgctgcaagtgtctctgtcaaaggcgccttgctggtcatcgttctgtaaccacgtttatgtaaagattccccggatgtatccaatgccaacgtcacttcatccttcagtaaaaaaatacggaccggataggctgctccgtcttctttgaaccagtccttatgatacttctgcttcatgcgctccaccattgctttctttgcaatggactggatatccgacggactgaacagtttgctgttaatggaagatgccttttttacccagaactttccgtcttccggaatatattcttcccacggaagattcttgattccctgaaaaagttcttcgaaggttgtcgccttaaaacgtccaacctggatcatcacacgttctgccgtgcgcaggaaaatgttggcacggcagattgcttcctcatctccctcaaacgtcactctgccatcttctacttttgtgatctcatatccaagatcatatatttctctttttaaaactgcctctaaaccaaaatggcaaggcacaagtaaatcaaatgttctcactgaaatctcctctaaaaataagtctaaaaacctattcttatattatctgttctattttgaactgtcaattgctaaaatgtggtaactgttcccgcatcgcatttgcgccaccgatcaccgtgtaaacctcatacccttcttttccaagttttcttgcagcaagaagacttgtacttccatactcacagtacaaaagcagaggacggttttttgagaagcggcagccccagtgatcttcgtcactatacgggatattcaccgcacctttataatggtattttctgtattcctgcggatttcggatatcaaccactcttgcccttttctgaaaacatatattctggatatctcttggatgaatggtatagaatgccatatttcctccctttatagcaagagacagatcacagtgtgttctgtaatctgtctctgatttttccttattacatgttatgcagcaattcgttttccgtgctactgctcctcgtggtggcagtcggaagttttgtttgtggatctgtttgtggacttgtttgcagatttattggtggatttgttctgaccactcttattctgtccattgctgttttcatagctgttctgctcgtaattattttcgctcttgtttgtactatccatgttttttgccatgataaaatgtcctcctgttttgtgtacaaaattttcttcttttttacatgtaaaactgttctgtcacatgcatttttattatttgaaaattcacacaaaatatacattttttaaattgctttttaaatatagataggctatactaacgttatgatacgaaaacgtatcatagttataccccttattaattatttatactcccctcagaaaaagccaggtgcacagcacccggctttttctataagtttgtatcatttcttcaacatgacaatatttacatctgataatataataagttgtctttcaaatcctgattcagctctccaccggcacgtttatacttgtcataaactgcaaggatacgtttcacgctcttagagcactggatatcgtagcggttcaaaagctcctgatacataggatttgctttcagttcgtttcgcaattctttcgagaacggacaataactcatgagaatctgtcttgaaactttgttcagacggtagcttcctctcgattcgtatttgatccagttctggtaatctttcacaaacacttctctgtaattattctttgcacggaataaagcatttttcagcttttcttttgcatccgcagacaagtcaaaattcttccggtaaaactggatgtaatcgcaatactcggcagtcagtgacttttcacggatatcattccagtgtacgccctgaatctttctgcagatctcccagcgatatcttgccattgtctcgatcatcatgtcttcgaggtctactgctgtaaagattgggaacataaagcgtgctgatgtgtctcgctttactcctgcagtctcctgccacatcattgctttcgtaccggcattcggcattaaaataatatccggcaatacctctttcataatgttttcatgattaattcctttttccgggtctgaaaacagcacttcccggtaaaaaacagaaaaatctactttacggatttgattgatcacttcctctaaccgctctgctgtcacaagcattttttccacggaattgatcagatcatactctcctaaaattgggcagaatgtggaaatctttccatatgttgcacggtttccggacataaacatattctgaatctcgtattttactttcagttcacggttatcctgaagctgtttcatctgtgcttccgtaatctgcttggttttaagcttctccaacaaatactgactgtaatcgagatcaaactcattcttggacggctcttttcgtccttcatagattgccttgagccattcatacatggtatacacatgctcggaatgacacaaatccaaatgctctgtcaggtcatacaatgcattggcattgtcctcgcccaccatctgcacatccataaatccaaaatttaaaaacatttcaatgatcggcgttgtctgatcctgctcctgcattgcacgcatgaataccttataatatacatcataaaaaactggtgttaactgttttctgatgcggtaagcctcatcatcagtagagagcatatccggcagttcacggtattccttgatcttgttacggacatcctctatctgcagttcatctaatcctgcataagtaagaatgtgctctaagcagtcctcgctctcttcttcatcactctcaaactcatcttcgtcctcatcaaaaactccgacagaagccacttcctctaagccattgcttccaaattcatagttctgatattcactccaacggtaatcaatgactctctgatcataaatctttaatttttctaccagttcaatgatcagttttacctctttattgattggttctaattcctcatgattaagtccggcacggatctcaaggtcaaagaataactggaaaatatcttttcctgactcactgatcagcagatccttattatataaaagatacgcagccatctcgctgattccctgtgccactcttcgcatctgcgcggatgcctccatgattgctccgacacagagactgtcatctttttccagaaggttcaaatattcttccagataatttgtgaccagactgctgctattatccatttcccatttttctgctttatggcgcatttccagagaatggaaatagtccattttcgaaaatggctgttcctctaactgatactgattgcaaatggttttataatcattataaaatgtctcgataaatgtatgaaactgtctgcatttcacatccagtcccgcataaacctgcagcatctgctgtctctgttcgattgctgcttttaaaaaatatctccggatcttaggatcattggataaaataccctgaagatcttccgaggattcacacagaaataccgcaagtacactgtcctccgccgcaatataatcacacagaaatctgtcgttctccaaaattccgacaatgccgttctgcttcagttccaattccacaaacgcatacttctggatcacagaaccttcctgaataaaataccattcttttactttgtcattcttttttgcgacaacctgacccttttgtaccttcaatacttccatacaatctacctgccactttcttatctgttaacgattctttatttctttgatgatctcatctaaaatacaatttgcagcactctgcttgctcatcagctctaattgcagttcccggtctctcgtgatgatcgtgatcagatttgtatccacaccgaatcctgcacctttttcttttaaattgttggcaacaatcatatcaagattctttttatccagtttttttctggaattttccagcatattttctgtttccatggaaaatccacataaatatgtctttcctttgttctgtcctaaatatgcaagaatatcggttgtgcgtttcaattcgatcacagcatcgcggtctgacttctttatcttctcgtcatagacctcttttggtctgtaatctgcaacagccgctgcttttattattatatcgttttctgacgcatttgtcgctactttttcaaacatttcctgtgctgaagtgactgggatcacatcgacaaacattggcggcgcgatcaaaatcttgcaggtacatgccattacagttgtagtaagtatatcatctgcaatcccgccagcgatttttccgatcaccgttgtaagcaccgccgcaacaattgcttccagctttcaatttgcacagcttctttattccaatgtacacaaagtatggtacgacacctactaaaatgcgtggcacaaagcaaataataagactgaagcaattgccgccgatttcccctaccgaataaaatggtgaaaacgcaaaggacagtaaattcggattaaacgtgttgtttttctttatgcgattttctgttttactctgtatttcaaatacttcatattcctgataaaacgacagtctgcttcataaaatgcaagacctgctgtcactgttaccagaatattgaaaggaagcgcaatataccatgtactgtccatgatttttccgccaagttcaaaatgataataaaccatctgtactaagaaaatatgataagatgcctgcccgatccatgtcaatgtatttccgatcattcccggcaattttatataataaaattttcggaataataatattacaatcggaaaaatataaaatgcaatcggcattgctgttgttttccagtaatcaaaaagaaccatgtcccagtcaaagccaaaaactgcaacaatataagccattccgatcaggaacatgctgataagctgatatttttttaccctgtgctccggatgtaaatacagataacatccaaatgagatcaaaagcaaatatcttccgatactcagccgataataatatttatccatatcaaatacttttacgccgatttcaaacaacaaattcgcggcacctgataaagcaattccaattttagcatttttttctaccagtttatatataataggaaaaatcactaacaactggatcatgatcggtacataatagcttcctggtccatatgcccccagtaaaaaaattctcggaggattaatatgcttatcttctatcattaatataataatttctatgatacagacagtaaaaaacggcacaagaaaacgtatcagttttggtttgatcatttcccatgcatacattttccttaaatttccacctgtttttttcctgttagacattgcgaaattatacccgctgataatcataaaaacaggaactgccatattaatcaccattgtaaagaatggagagcctttatcttcccattcataatgtgtaataattaccataataacacaaattgctttcagataatctaaaaaatcaattctttttttctctacttttgtttcactcatataataactactaacttcctattttattgcacaaggaaagtccttgaaataaatttcaaggacttagatacgtgcgcgagaagattcgaactcccgacaccttggtccgtagccaagtgctctatccagctgagctacgcacacatattctttttcttt

SEQ ID NO: 14296 - DNA, 366586 bp, Unknown
  gut microbiota DNA sequence
agatgcaaaaaaatatcaggtatatagaaaaacagagagtggaaaatgggtaacattggcgaaaaacgtggaaggtacaagttatacagataccacagcagaaaacggagaaatctattattatacagtaagagcactgaatggagatagaataagtccatcctttgatgcaagtaaatctattacttacaaaaagccttccacacaagttccacagacaaccttctcaaagacaagtggtaacgtgaccttcaaggtgcagtatccggaaaatataacatgtggaacgcctacaacttttaaattatcttcagaaggaaccacagataaggtacaatatgctttatatagtctgacaacagaagatggaacaattgtttatgatacaagttatgggtctaatggaaagtttttttcgaaagatagctttgatttcacattttatgcttctggaacatactatattcgttttgcaatcatggatacaggagtgtctccgtatgtatggtttaacacaggtttatatggcataaaacttgtaattgatgataaaggttatccgacagtagaaaatgttgtagcgaatttaaaagcgcagtgtgagaaaacgtgcacaacggatttcgagaaggcagtttggtttaatgactggctggttgaaaattgtcgttatgatttcagctattcttattgtgcgcctgagggagcattagccagaggattaggaacctgtgaggcatatcatagagcatacgtgatgcttttgaattcggttggaatagcaacagatagaatttctggagatggtcatgtatggacaggtgttcaattagatggtaattggtatcatattgatacaacctgggatgatgccggttatgaggataatagtgtagatcttcagcatttatattttggattaaatgatgaattgatgaatcagattcatagttcagttacttcatctaatggaattagtgcacattctttagaagataattattttattaaaactggtaaaattaaaaaatggtcagatcagtatgtgagtactatcagggagcatttgaataatggagagaacacatttgatatcacaataaatgattctatgatagattcttataaacagattatttattatctggtcgcatatcaattgtctaatactgattggagtggagaaaagcttatggtaacatattctcagaatatgttacattgtgttatttattaaaaaaagtgggtatctgattttcagctagtaacctttattatggatgaacataatgaaggttacttatatgctgtgataacgaaaaaattacgccatatcgaatggtgtaatgtgaacgaaaaaattataataaacatattgtttcctatgtgctgaaactttgtggattgctaaagaagtgcttgcatagggtatactgaaatgatataactatatatgtacgaataagataatagggagataaaatggaaggaaaaaaagatgtgatatatatttcttccaaagaggctttgataaaaatctttgtattagtacttactattggaataagtgtattggcatctatgttggactataaatcgtgttatgtaaccatattagtgcaggcatgtaacaatatgtatgatttttatcaatatacagataataagaaatatgtaactatagtcagaagagaatcaattgcaattatatttttttcgattattgcaattattggggctataatggcattgcttgaattatatgctgttatgcagtctatttggataaagttgattgcaatttcgtttgtaacgataccattgattgttgtgtataatgattacagaataaatgtaaaaaaagagaatgagttggaggtttgattttgtgagtgatattacagttgttgttggatatattataattatctttataatgtgcaaagcttggaattggcaggtaatgaagcgatatgcgaagcaaaaagagaagaaattaaattttacaaagattttttgtgaaaaaaatttagaaaaaatagaaatagttggaactggaaatgatgggaatagtgattttgatgttttggatgctataggaaaaatagagttgcctaatgatgtgaggattaaagtctaatgaataaagtagattttttaatattttatgaccatgtagtaaaagaaataggaatgcgattgcaaaatgagtatagacaatttaggttttgtgataatccaacttctttgtatgaagaatatctcaatcaaaagacgatgttaagaattttatacgaaaaaaaagaaggcgaaaataaaactttattagataggcataaagtgtgtgcttgtatgacagtagcaattataaaggttagattgataagtggagatattcagacggataaagattttactttatcatctgcatcaagagtcaatgagcaactagcatttatgagtgcgtgggaactttttttgggatttataagacttcataaagaagaaacaaataaaaattataaattgcctgatacttatcataatgaatcttttttggacacgattacaagatcattatttatggctaatcagctaaattctttatcaactcctttaatagctaatattttctttttgttggaaaggtattttgaagtagaagaacagaaaagtataaaaaatgaattagacgtaaaaaatagataggcatattagatattaagttatctgatatgctctatttgttatatagtacgttgtgggaggcgcaaatgaaaaaaataaatcaaacgaatttaaaaagaagaatatcattaatgcttttaattacaattatcttgatgtcaagtttagttgttggatgtggaaagaaaaatgtaaacacagtaagtacaaaagaagatgcattggtagaggaaacagaagaaagtgagaaaatagagcaagagacagaaatagttcagacagaaagtgaggagaaaaaagatttaggaacatttgtattgtatttcagcggaattgatgtttggggatggacagatacaaaaagcagaagtgatgtaaatattatagccgcagtcaatacagagacaagacatgttcagctgattaatacaccgagggattattttgttgaaatgccaattagtaatggggcaaaggataagcttacgcatgctggattatatggtgttgagaattctgttggaactcttgaaaagctgtatgatactgatattgattattatcttagagtaaatttttctggatttgaagctattattgatacattgggtggcgtagatgtttattcagagtatgattttacagttgatccaattaagcattatacagaaggatataatcatttgacaggattagaggcattggcttttgtaagagaaaggcatgcctttgcatcaggtgataatcagagaggacgtaatcagatggcgatgcttcaggcattgattaaaaaagtgtgctcaatagaatttcttgaaaattataatgaagttatggatgaacttactgatatgtataggacgaatataccagatgaactgttgaaagatttggtttttaatcagttgatggatggcacagagtggactgttgatatttattcggttactggaagtggcggaagtgagaaaacctactcggcaccaaattcagcagcatatgttatgattccaaatgataatgatgtcgcacaggcaaagagcctgatagaggctgttttaaatgaaacaccatagatgaatattcaaaggaaagaaaatttaaatgatacaatccagaaagaatttattgcatgggtgcagagtgcccagaacagtgattttaagtgttttatcagttgaatacataatacttttttacagtagtttgcagaggttacagggaatattattatttattgggtattttttgctgacagttgcgataacttgtaataatcatggaagaaatgtacaagtgaagtatgagcaggagctgagcttaatcttaaaatgtgtagctactaatcttattttgagtgtatttatgtgcgctgtatatgtagacaattgcataccgtatatgattagattggggattttacttatacttcaattactaagtattattatcatgtgcgaaatagtaatgaggattactattgaaaattataagggaaagcgtttgtatttatatcaggagaagacaatagatatttcatcgattccacaggcagaattaatatcagtagataaagtctcaatggaaattatcaaacaaaaaataaaggaatatgatgaagtgtatttgtttgatcttccagcagaaaagagaaatgatttattaaagatttgttttaagacaaacagaccggtttattttactacaaaattatcagatatggagctcagagcggcaggattggcacaagatggagaaacaccgatattttataggcaggcaggacgaataggtggaatttctgctgctttaaagagactttttgatattttattttcaggtgtacttcttgttatattagctccattatttggcattattgcattatgcataaaattggatgatggagaaaatgtattttattatcagacgagatgcacgcgtggaatgaaaaagtttcaaattataaagtttcggagcatggttgttggagctgaaaaatttgcgggggcacagttggctcaaaatagagatccaagaatgactcgtgtaggttatattttgagaaagtataagctggatgaattgccacagttaattaatatatttagaggagagatgagttttgtaggtcctagaccagaaagaccagaactaatagaggaaatagcggaaaaagttccggaatttacatttcgaacgacagtgagagctggattgactggttatgcgcaggttcatggagattatcacacagaatttttggataaattaaaatgggatttgatgtatattgaaaatttttcattaatgctagatttaaaaattcttttgatgaccattccagttgtattgaaaggaacagatgatgtgaaataaaagcatttcttttattgacaaatgaatttcatatgttaaaataaatcatgttaaaagcataaaaaatgacgttgacgaggagtattaagaacgaaaaagtttcagagagctgtcggacggtgcaagacagtatttggaagttcccaactcgcctctgagttttctggttgaaacaattaacagcaaagtagatcagaacgtgtggttcgcgttaagaatgtgagtgcgtatttagatgaacagtttcatctggcgaatgagagtggtaccacggagtgaatagatatcttcgtctctttatgagacggagattttttatgcttaatagatatatcaatataagaggaggaacattatggcagaactttataaccataaagtagtcgagaaaaaatggcagaaagtctgggatgatgagaaagcatttgcagctaccaatgactttacaaagccaaaatattatgcattagttgagttcccatatccgtcaggacagggacttcatgtaggtcatccaagaccttacacagcacttgatatcgtagctagaaagagaagaatgcagggatacaacgttctctatccaatgggatgggacgcattcggacttccaacggaaaactatgcgatcaagaacaagattcatccgaagatcgtaacagagaagaatgtagcaagattcaaggatcagcttcattcacttggttattcttttgactgggacagagagatcaataccacagatccaaattactacaaatggacacagtggattttcttaaaacttttcaaagcaggtttagcctataagaaagagatgccaatcaactggtgtacttcctgtaaagtaggtcttgcaaacgaggaggttgtaaatggtgtctgcgagcgttgtggtgctccggttgtccgcaaggtaaaaagtgagtggatgttaaagatcacggattacgcagagaaactgatcgaaggattagatcatgtggattacatcgagcgtgtcaaagtttcccagaagaactggatcggtaaatccacgggagctgaagttgacttctctatcaaaggaaaagaagataaacttcgtgtatacacaacccgctgcgatacattattcggagttacttacatggttgtatccccggagcatccgattattgataagtaccagagcgagatcaaaaactgggatgagattatggcataccgtgaggcggcagcaaagaaatctgattttgagcgcgcagagcttgcaaaagacaagaccggtgtatgcattgacggtctgacagcagtaaaccctgtaaacggaaaagagattccggtctggatctctgactatgtattaatgtcctatggtacaggtgcgatcatggcagtgccggcacatgatgagcgtgactgggaatttgcaaagaaattcaatctgccgatgatccaggtggttgcaaagaacggagaggaagtggacatcaatgaggctgcatttacagatgttgcaacaggtgttctgatcaactcagactttattaatggacttgaagtaaaagatgcaaaagcaaagatgattgaatttttagaggaaaaaggcattggaacagccaagacaaattataaattaagagactgggtattctcacgtcagagatactggggtgaaccgatcccaattgtacattgtgataaatgcggatatgttccgatcgatgagagcgaacttccattaatgttaccggaagttgacagctacatgccgacagataacggcgagtcaccactggcagctatgacagactgggtaaatacaacctgtccttgctgtggcggaccggctaagagagagaccgataccatgcctcagtgggcaggatcctcctggtatttcttaagatataccgatccacacaacgatgaagcacttgcaagcccggaagcattaaaatactggatgccggttgactggtataacggtggtatggagcatacaaccttacatttactgtactccagattctggcataaattcctctatgatgagggtgttgttccttgcccggaaccatatcagaagagaacttcccacggtatgatcctcggtgagaacggcgagaagatgtcaaaatccagaggaaatgttgtaaatccggatgatattgtaagagaatacggtgcagataccttaagaacttatgagatgttcattggagcatttgatttaagcgcttcctggtcagaggatggtgtaaaaggatgccgtcgtttcttagagcgtgtatggaaattacaggatcttatgacagacgaagaaggttattctgctgacatggagacaaagatgcatcagacgatcaagaaggtaagcagtgattttgaaaatctgaaatataatactgcaattgcagcaatgatggcactcatcaatgatttctataagaaaaatgcgatcacaaaaggtgagttcaagacattgatcactttattaaacccggttgctccacacatcacagaggaattgtggcagatcgctggctttgaaggaagagtttatgagacatcctggccggaattcgacgaggcaaagacagtagagagcactgtagaaatcgcaatccagatcaatggtaagacaaaaggaacacttgctattggaaaagatgatgcaaaagatgatgttatcgcaaaagcaaaagaagcaattgcagataaactgaccggaaatatcgtaaaagaaatttatgtaccgggacgtatcgtaaacatcgtaatgaaataatgtacgcgaaggtgaaagtgagcgtattttgcttcgcaaatataatgagcgaaacagagaaaaatgccgtggcgactgccacggcatttttgctgcataaatttttatttagttcgtaattatttctgatatgttttataaaaatgaataaattccgcgagtgatttcgatggctttgtagttgttttgtatgcgaatccgacttcacgcttatggatcgggaaaccaagtgggatttccacgagtgtaccattttctaaatcttcacggacaaagtttttgataacgcaggcaacaccgacaccaatacgggcgaagtcaatcagaagatccatgttggaaatgtcaatggaatctttgatcacaatctggttttcctgcagatagtcatcaatatactgtctggtcatattatttttatctaacagcatgagtgttgaactttgcagaatatgatctttctggatgccgcgtgcctttaaattgcgcaggtaatcttttgctgccacgaaaatatcttcaatttcctctaaaaaatcaaaatggatatttttcatattttccggtttgccaatcaatccaatgtcgattttattatcttccagcaattttaaagtatcgttggtagactgacaggagatagaaatggaaatatgtgggttctgccggataaattctttcaggtaagggagtagaagatatttacacagcgtggaactgacaccgatttttaagtgcccgatgccaagctcgatagagcgctttaatttttcctcgcctaaggtcaaagtttcaaaagcctcgctgacatgctcgtagagaagttttccttcatcggtcaatacaacaccgcgggagcttctggaaaaaagcttgcagccgacactttcctctaatttttgaatggatttactgatcgccggctggctgatataaagttccttcgctgcctttgagatattcccggtgtttgcaactgtataaaaaatgcggtaagaggatagattctggttcataaatactcctttttgctgtttataatatgcttttaaatatacttacttttgccttcgcatatattatatcataagacgtggttatggtaaatatgtttattatgtatttgtattataataatgattgtgatacgataatttcaatgaatagataagaaaatagtaatggtttcgtattagatataggatgtaagggtacggaaatattacatgagggaggattttatcatgggaatgacaatgacgcagaaaattctggcagcacatgcaggacttccgtcagtaagtgcaggacagttgattgaggcagaattggatttagttcttggaaatgacattacatcaccggtggcaatccatgagatggataagatgaaagtggatggtgtatttgataaagataaagtagcactggttttggatcattttgttccgaataaggatattaagtcagcagaacactgcaaatgtgtgcgtgaatttgcatgtaaacacgacattacgaattattttgatgttggagagatgggaatcgagcatgcactgcttccagaaaaaggacttacggtggccggagatgtgatcattggtgcagactcacacacatgtacttatggagcactcggagcattttctacaggtgtaggaagtacagatatggcggctggaatggcaaccggaaaagcatggtttaaagttccgtctgcaatgaagtttaacctgactggaaaaccagcgaaatggatcagcggaaaagacattattttacatattattggaatgatcggcgtggatggagcactttacaaatccatggaatttgtgggtgacggtatccagtatctgacaatggatgatcgttttacaattgccaatatggcaattgaggcaggaggaaaaaatggaattttccctgtagatgatcttgcaaaacagtatatggaagaacattccaaacgtccttatgtggtttatgaggcggatgaagatgcagagtatgacgaggaatacacgattgatttgagtacgttaaaaccaacggtttcattcccacatcttccggaaaatacaagaacaattgatgaggtcggtgacgtgaagatcgatcaggtagtgatcggttcctgcacaaacggacgtatggatgaccttcgaattgcagcctctgtcttaaagggcaaaaaggtgaaaaaaggtctgcgtgtcattgtgattccggcaacccagaatatttaccttcaggcaatggaagagggattgttaagaacctttatcgaggcaggtgccgttgtcagcacaccaacctgtggcccatgtcttggtggctatatgggaattcttgcggcaggtgagcgctgcgtttcaactacaaaccgtaacttcgtaggtcgtatgggacatgtggattccgaagtatatcttgcaagtcctgcggttgcagcggcaagcgcgatcaccggaaagatttcgggaccggaagaagtaatgtaaattgcaaaacaaggaggattttatgaaagcagcatgtggtcatgtatttaaatatggagacaatgtcgatacagatgtgattattccggcaagatatctgaattcttcagatccaaaggaacttgcaacacattgtatggaggacattgacaaagattttgtaaaaaatgtaaaagagggagacattatcgtagccaacaagaatttcggctgcggttcttccagagaacatgcaccaatctcaatcaaagcggctggtgtaagctgtgttattgcagagacatttgcacgtattttttatcggaatgccattaatattggtttgccgatcattgaatgcccggatgcagcaaaagagattgagacaggagatgaagtggaagtgaattttgacacaggtgttatcacggataagacgaaaggcacttcttatcagggacaggcgttcccaccattcatgcagaaaatcattgactgtgaaggattggttaattacatcaaccagaaataacgattcatctttcaacataagaaaaagtaatagagtcacattaaaagatgaaatattttaaatgcgtcagaaggactgttgcatgaactatgaagttcgtgtggcggtctttttatatgctaagaacgaccttgaaagatagaaagttatttttagcccagacctgctttgagaagattcaggtaatccatatatttttttgaaatttttacatgcgtatagaactcggcatattcccgcggagacagtgtatctacatagttttccggaaattgtctggatattccggcagcttttgcaaggtcggcagctttattataagcgaccgcagcacgggcttcgtctgtataacttccaactttataattaccgttgatatggataaaaactttataatgtgtttctccatttttctcatagctgaaaacaccgtggtagcggtttatattcagaatgttggaataacggaaatcgtgcacatcaccattgaaaaaaagatagtccctgcccacaacggcataaggcttaattccgtagcgggataaaatagagtattgcataccgtaatcactcacgaataagtgcccctgacgtttctggatacggtgtccggcataataaaacagatcatcaatatcaaatttcaattctatttcatcggagagaaaataactgaaatatcccttgcgaagatagatcggattgcgaaaatacaaattatgatcgcggaagtttaaaaggcacacagctttgtcaaacgaaagacactggatatgatgctggagatttacaagtgtgatgtcttcatcttccagcagtttacaggcttccagatagcaggtatgtgcatcattttccaaggcaaagctgccaaggctgatatgttttgttttataggtaatattggcacggtaataaatgcttccgtctttttttgtggcattataaactccggctggcatagcttgtctcgctccttttgacatgatgatcactattcactaatgagatgatattaattattttatcattttcgacggcagagaacaatacaaaatcaatcggaacgactgaatataaaaaagagataaaattataatgtcgaaatgatgtaaaatattgtctcttaaacaggaatttggtataatatagcatagaaattttcttatcaaaagagtaatttgaaaaggggaaatctgatatgagcagaaatgtagacaaaaaacagaagaaaaatggaacgataaaagtacagagcaggatgagccggaaagtgctgatcccggttgtatgtctggtggtagttgcactgttatcttcctggatcggacatcagaatttaacgtccatgtaccgtgccagcaatgagatcaccagtgtatatatggaaaagacagcgcagttgaatgaaatatcggacaagttcaaggagatggagattcttgcctatagtatgtgtgtgaccaagtcaacgaatgaccgtgccagcatgttagagcagagcgcagcaacgaaagaggagatcaatggactgttagataaactggatcagatgtctgtcacagaggatgagaagagcagggtgcagacgatccgcacttattatgaaagctttacggatgcctaccagaaagtgacggacagcattgagaacggcaataagacacaggctcaggaatattgtaatctggaactgtttaaggctgcaaataagctgagtgatgcactgaactcttatattgagttttacaatacggatgtagatacggtcgttgcaaatcaggggaatgtatacaatcagggaatttatgcaaatctgattgttgtgggacttatcatcgtgatgctggtagcgtctttatatacaaccatatttaaagttgttaagccaattaagaagacatcaaaagaactaaaagttattgtgaaggatatgcagtctggtcatgcggatatgacaaagcgtgtgacggtaaagggcagcgacgagatcgcagaacttgcatccggtatgaacgtgttcttagataccttgcaggaagtattaggcgagatcgcgaccaactccaatgcaatccaggatgtcgtgcagaatgtaggaaagagcgtggataccgcgaatacgaatgcgtatgatgtatcggctgttatggaagaactttctgctacgatggaggaggtttcttcatctgcaacaaccgtgacagacaacatttcgaatgtcaatgatgaggtgatcagcatagccgacgattccaaggcaatgaatgattacgcttccacgatgcaggaacgcgcggagcagttaaaacagaaagcagtcaataatcaggaaaacacaagccagatgatcgccggaatcatagaatccctgaaatctgccattgaggagagcaccagtgtcaaacatgtcaatgagctgacagaggagattttaagtgtttccagccagacaaatctgctggcattgaatgcgtccattgaggcagccagagccggagaggctggaaaaggttttgccgttgtagcagatgagatccgtaaactggcggattccacaagagagaccgctaataacatccagagcattaatgcacaggtaacagatgcagtagaaaagctttctgaaagcgcaaatcagctggtagagtacatagatgaaacaatcatgccggattatgacagttttgtaaaaacaggggaacagtaccgcgcagatgcaacctatgtcaatagcaccatggatcagtttgaggcgcgtgcaaacagtctcaaagaggttgtgatcgtgatgaaacagtctgttgaggacatttcgacagcgattgaggagagcgcaaagggaattgcaaccgccgctgagaatacgaacattcttgtggaaaatatggataaagttaaggcgaaaatggaaacgaaccagcagatcagtgacaagctgaaagcagaatcaaatcgttttcagggaatttaagacaatttaatgctttaatgcattgacacgagagaacgttttatctataatgagcgaaagagagaaaaaggataagaggattgtgaaaatggaattgatgtacacaagcaccagaaatgcaaaagaaaaagtgacagcttcacaggctattttgaaaggtcttgcagaggacggaggattattcgttccggagcagcttcctacattagataagacggtggatgaacttgcaggaatgacttatcaggaaacagcttatgaggtcatgaaaaagtttttgacagactttactgaggaagaattaaagaagtgtattaatgcagcttacgacagcaagtttgatacagaggagattgcaccattagtacaggcagatggcgcatattacttagaattattccacggatctaccattgcttttaaggacatggcattatcaattcttccacacctgatgatcacatcagcaagaaagaatcaggtaaagaatgatatcgtaattttgaccgcaacttccggtgacactggaaaagcagcactggctggattcgcagatgtcaagggaacgaaaatcattgtattttatccaaagaatggtgtcagcccgattcaggaaaaacagatggtgacgcagaagggtgataatacatttgtagttggtattcatggaaacttcgatcaggctcagactggcgtgaagaagatttttggagataaagagatggcagcggagttagcggcagccggatatcagttctcttccgcaaattccattaatatcggacgtctggttccacagatcgtatattatgtatatgcttatgcaaagttatatgcaaatggagtcatcggaaaagatgagaagattaatgtggttgttccgaccggtaattttggtaatattcttgccgcattttatgcaaagaacatgggaatcccgattgcaaaattaatctgcgcatccaatgagaacaaagtactttacgactttttcacaaccggaacttatgacaagaacagagagtttatgctgacaagctctccgtccatggatattttgatctccagcaacttagagcgtctgatctatcgtattgcaggaaatgacgcagctaagaatgcagattttatgaaagccttaaatgctgccggaaagtatgagattacaccggaaatgaaagagcagcttgcagatttctatggaaattattcaagcgaggcagagacagcagaggagatcagaaacttatacgagaaaacaggctatgtgattgacacccatacagcagttgcaaccggtgtatatcataagtatctgaaagagaccaaagatacagagacaaagacggtgatcgcatcaaccgcaagtccgttcaagttcacaagaagtgtcatggatgcaattgataagaagtatgatgctatgacagactttgaacttgtagatgaattgagcaagattggaaatgtaaaagttccaaatgctatcgaagaaatccgttcggcagaagtaagacataagaccgtatgtgaagtggacgagatgccgcaggttgtaaaacagtttttaaatgtaaaataagaatttcactgatttgggatttgaaaagatcagaaagataaaaaataaggctgactgatagaaatatcagcagccttgtttttgtgctataggaaattgcggtgcaacattcttatatagtaaaaataataacaattatctctgcaattcaaaaataaaattaacaacgccaaatggatacatgatctgcaacagataagaagtatccgaaaggtcgatcagttcgtctgagacaacctcaggagcctctaaggttaattcttttcctaatgtgttagaaatatttacattatacagtccgttgtgaagatttaggaaatcttcgagggaagcctgtacatattcatcaaactccgtaaattcctcattgacatatctggaagcaaagctgatacaggttgtttcaggcatatccagatagatcttggaagaagattctccgttgatcgtctgtgaaacacagtaatttaccggatattctttgcatggattgaaacacaatggcgtgaaatcatcaccgataaaacgtgtcagatcattgaacagtaatctcatgtaggaggcattgtattcgtccgcagtcagatcagaggtgtggaaaaagtttgcaaggatccggtcgagatcatcctgcttttcattgctgtaatcaagatcatataactcgttctcagattcataatcagagatcagtgtttcaagctgtgcatttgtaatataaccttcatctacaagcgtctgtcccaacaataaaaaatccggatactgtgtcttgacaagttcatccacctgttcttctgtcagatacccctcgcggatcgccagatcaccaaagcggcagtcattatgtgtctgtgagataatgacattgtcaacctcactggcagtcatatatcctttcataatcgcaagtgttccaagtttcatatgctgggaagttttcttgctgagggcatgcaataactgttcttttgtcactgcattgtgagataataaaaatgttccaaaaaactgtgcgtacatatcttatctcccttcaaatcttgaagtaatgatactgtgtaactgctcaggattcaaaggtttctggataaaatcttttgcacctgcctcaatggcggaacgaagctgtgactgggttcctacagaagaaacaataatgatctctgcatccttgtcgaaatcaatgatctcacggattgctgcattgccgtcctttaccggcatcacaatatcaagaaaagacagatcaggtttttcctttttatagatatcaatcgcatcctgtccgttggacgcctcaaaaaaaactggtgtaccatattttgaaatcaaatcttttaactgcttccgtgcaagtatggaatcatcactaataagaattttagcatcatctagtctcatagttaatccccttttcctagtttgtttataggttctattttacactaaaaaaaattcgcatgcaattgtaatatgtaaaataactgctgtttttcacgaaaagaatcaaaaaatgtcccgatttagttcttgaatctgaagaatagagagattataatgagatcatctttgtgaaaacatgggtggaaagggataagaaaatggatgttatgcttatatttgacgttgtagttgcgttgttcggtgcgtatatgatattttccgcgcttcagatgaaaaaaagcggcaagatcaattccatggttcttgcacaggaagaattaaagaaagtaaaggacacaaagggatttatcgaatttttatactggcgtgagatgctttttggtgcgttagtgcttatcgtcggcgttcttggagtattgaatgaaacgattatctcgattggaaaagcaagtattttagaagtgatcatttttcttgcagcatttatctggtttcagaattcgttagcgaaagcgcgagagaagttcttatgtttgtaatacataagaaaatgtataaattggcaattgcagaaaatcagacgaaaatatataaaaacacactgtctccgaaaaaaacatgagacagtgtgttttttagtgaattggtttatcgttcgtaaagtctgttctaataattagcgttcgtccataggaacgtaggttttccgttcgccaacattcttgtatgcaggacgcatgatcttgccgctgtgtgcgacttcttccagacgatgagcactccagccggagatacgtgcgatcgcaaaaataggtgtgtaaagctctaccggaagtcctaacatgctgtaggcaaagccactgtaaaagtctacgtttggactgacacctttataaatctttcgttcttttgcaataatttcgggagcaaggcgctcaacggttgcatagagtttaaattctttttcgtaacctttttcctcggaaagcttttcaacgaaggagcggaagatgacagctctcggatcggaaagtgagtaaactgcgtgtcccataccatagataagacctgcatggtcaaaggcttccttatgcagtaattttgtcagataatctgcaatctcatcctcattcgaccagtcttttacctgctgcttcatgtcatcaaacattttcacgactttgatattggcaccgccgtgttttggcccttttaaggaacctaaagaggctgcaatggcggaataagtatccgttccggaggaagataccagatgcgtggtaaacgttgagttgttaccaccaccgtgttccatatgtaagattaaggcagtatctaataattttgcctcgagcggtgaaaacttactgtcggcacgtagaatatgcagaatattttctgcggtggagtattcttcttttggcggatgaataaataagcttgcgccgtcgtgataatgcctatatgcctgataaccataaacggaaagcaatggaaataaactgataagctgaaggcattgtcttaatacgtttggaagggagatatcgtctgccctgtcgtcataggaatagagcgtcaatacacttcttgctaaggtgttcatcatatctttgctcggcgccttcataatgatgtcgcgcacgaaactggtaggcagtgtgcggtatttgcttaacatctttgtgaattcctgcagttgttctctcgttgggagactgccgaacagaagaagataggtacattcctcaaagccaaaatggcttttctcgtcgatcccggaaataatatcttttacattataaccacggtagtagagctcaccgtctgccggatgtgattcaccgttgatgatcttcgtggaacatacgtcagaaatctcggtcagtccgacaagaacacctttaccattgatatctcgaagaccacgttttacgtcgtatttgttatataattccggatcaatgacagaacattttgcactcagctcagacaaatgttccaattccggtgttatctcacaaaatggattattttttgtcattcaaagccctccttcaatttatcgcgttaacttataatagcatatgtactaaaattaatacaagaaaattgttttaattttaaataaatttaaaaatatttttagaaaaagtttacagattgtgcgttaagtttctaaaatatttctatacaaggtggagatattagattagaataaagaaaacaaaaaatttgtcatttgctggaagtaatctggacgaaaaaagagaaagaacaggagatatgtacatggaagcagaacagttgattaaggctgccattgaggcaaaggagcatgcgtacgcaccgtattctaatttcagggttggcgcggcacttctgacgaaaggcggtaaggtgtatcagggatgtaatatcgaaaatgcagcctattcgccaacaaattgtgcggagcgcaccgcattttttaaggctgtctacgagggagaacgtgagtttgaggcaattgcgatcaatggagacggtgatgattatctgtttccgtgtggcgtatgccgtcaggtaatggcagaattttgtgatccggatacttttttgatttatgtttcaaagaaaaacggagcatatcaaaagtatacgttagcggaattgttcccgggagcattcacaaaagacgacatcgataaagccagagtttactaggtggaacatgtttttgctgttttgtcaatggataaaactacaagaaaaaagtagtaaatttggtagtattttttactcgttcgcattaatttttgcttgtgaaacagggaacattaaagtataataagactatcaaaaaacagcctgggatgtgcgacaccctactattttgaacctacatttactttaaacgggattccaacattttcaattggatgccaggcctcagtaattcgctgtggcggcgggggaaggcaaaagcttgattgaggttacccacctagcgctggctaggagtcaaaattgtaggaaacggcattttgggtattacaaaagatgataaagtacagaagaattttaagagtgcaaaggaagtttgaaaagtaccaaagaatatcggaagcacagaagaagctttagaatacgacagattttttgagatacggaagaacaatgacaaagtacaaaggattcgataaagtacaaaagcatttttaaatacaaaagagagaagctgctttcttagaaagcagcttctttttaaatgttgtgcaaaaaagcggcaacatacgtgggaggctttgattgggaagaaaagtgcattggaaaagaaaactgggattgcttatcattctgcttttgatactgcttggcatgatctttgcaggaacaaaaagaggttacaaaaaagacgtttattcgaagcactatgtgccggtaaaagaggtgcaggaggaactgtctttttctatatataaggagctggactgggaacaggcggtacactgggagagagagtatctgacgagacagactgcaggcgagatcttagaactccttgggttaaaggaatacatagaacttccagaagggagggagagcgaggcgttagaccgcgaacagtggaaggaagtttatacacagattttagattatctggatgatgaaaaaacaatcgaaagcagacagatcctgcttatggatgtgatagaatcggacaatggcagtatccttgtcacaaatgagggggattatcccacaacattttgcagacagtttttaaaagtctgggattgttacgaagtgtatgtatcggagggagcctgcattggaattgccggaaccagtgaggatgaggcgacagtgcataatgtatacataaaaacggcagaaaacggacaacttacttttttatccggcggtgcagaatatgagatcacaatggaacctgcggaaaaagatgtgacagaaggcgtggcagatcttgtgttttccggtggaaagttagagatcgtgcgccaaaaagagcaggagatccaaggaaagctgttgtcctatgatgagaatatcattgaaatcgagggatacggaaggatttctcataccggaaaaatcccggtctatgcacttcttgaggggcaggacgtcacggagagctccatttcaaaagtggtgcttggaaatatggaagtttcctatgtgatcggggaaggagaagtctgtgccattctcatccagacacctgcggtgatcgaaaatatcagggtattattgttagcggacgggggcgaaaagttccgcccggcggtttatttgaaggcggacacggatgcaaaaatcgaagtgggagagatgacatctgattatgctgccggaacgttattagatataagtacatggctttcggaggaggatgcaacttttatcttgcagccggtaacagataatggaaaagtatttttatgtgatgaagccggaaacacggtttccaatggctattgtggcagcatggaggtgcggcattacgaggaaggctatacggttgtgaacagtgttccgtttgaaacttatctgactgcggtagtgccaagtgagatgccttccacttatgagaaggaggcgttaaaggcgcaggcagtctgtgcgagaagttacgcttatatccagcttatgcgtgcagatctggcggcttatggggcgcatatcagcgacagcacctcgtatcaggtctataataaggtgccggcaggagaggcttccatacaggcggtggaggagacaaagcatgaggtgatgacctatgcggatgaagtgatcgaggcgtattatttttcaacttcaatgggatatacggatacagccgaggtatggaatccggaagaaatggaaaactatggttatctgaaaaaagtatgtttaaatgagccgcagacagaggcagatctgtcagaagagactgcttttttgaattatattacgacgccgcagaccggatttgacagcgatataaagtattaccgctggtctgcacaggcagatttttccggaaaagaggcagaaatcagacagattttggaaaacaggcattccatttctccgaggaacgtgatatattatgaatctaatggaaaaaatgagacagaatccatggaggacttcggaaagctgaatgacatcgtgacagaaaagcggagtacatcaggttctatcctgactttacggctttcttatgagcacggcatggtaaaagttttttcggaatataatatccgcaaagtgttaggtgctatcgtgacacagatcacatatcaggacgggagcacgaacagcgcagtgacaatcctgccgagcgcggctgtgagtcttgtaaaaggacaggacggaatgtatacactatatggtgggggctacggacatggacttggcatgagccagaatggcgccaatggtcttgcaaaagcaggaatggattacagggaaattttgaacttcttttataaggatattgagatcaccagtctggagaaccgctgaacaatgaaaatataagagccgtaaaaatacagctttcgtggattttggtgagagatgaaaatgagggaggagagaaagagttgatttggaagattatcggaaacggaaaatctttttttgataaatgtaagcgggataagatcaatgcatattctgcccagtctgcattttttattatattatcgaccattccgtttttaatggtgttttcctctcttttacagtacacaccgatcacggagggaatattgttaaaaatgtatcagactgcgctgccggattatatttcagcgtttctgatctccattacggatgaggtgtataaccgttcggtcggaatcatttccattaccgcgatcgtggcaatctggtcggctgcaaagggaatccagtatatgacagacggactgaattcggtgaatgacttagaggagaaccgcaactggtttgtgctaagactctgggcaatcgtctatacgatcgtgtttttgtttgcagttgtatttacacttgttgttctggtattcggtaatacgctgcatgatctcgcagttgtgtatattccaatcctgcaaagcctcacggatctgatcgtgcgtctgcgtggttttgtgctttttggcatattatttgtgtttttcgatatcatttttacgatgcttccaaataaaaagctgacttttaagagccagatcccaggtgcggcaatctgtgcagttgcgtggtatgtgttctcgttcgcgctgtctatctatgtggactatttcaatggattttccatgtatggaagcctgacaacgatcgcattgatcatgctgtggctttatttctgcatgtatattatgatgatgagcgcggaagtcaacgtgatttttaatgagagcttccggaaatggttaaagcgtgataagactaagaaaaaaaggggttgagttttcaaaaaccctgtgatagaataacaaatgaatttgatgctggtaagagcatcagaaataggaacaggcttagaatgtgtcagtagagcactatactttttaaagagagagcgggtcaccggctgagagcctgcttaaggtaagataggaatcgaatttcccacaggagccgcatttgtgaaagcagaatcaatgtaaatagcagatgacgttttatgcacgttacgcatttatgaagtgcttttcttttgaagaaagagaagaatcagggtggtaccgcggaatcattcgtccctacatcagggagaatggttccttttttgtatcctgaaaaatgaaaaaaggagaaatgaaaatgaaagacaaattgcaacagatcagagagaaggcaattgcagaaatcgagggatctgacggattagaacgtttgaatgaagtcagacaggcagtgcttggtaagaaaggtgaactcaccgctgtgttaaaaggaatgaaagacgtagcgcctgaggacagaccaaaagtaggacagtgggtaaatgatacccgttctgcaatcgagacgatcttagaagagaaaatgaaaaaattagaagcagaagctttaaagaaaagatatgaggcagagaagatcgatgttacaatgccggcagtcaaacatgaaaaaggaaatcttcatccggtaacacaggtccgcaatcagctcattgatatttttgcatctatgggattcgaggtttatgagggaaccgagatcgagacagattattataactttacagcattaaatacaccacaggatcacccggcaagagatatgcaggatacgttctatctttcaccggaatttttactccgtacacagacatctgccggacagatccacgtcatggaagcaaagaaaccaccaatcaagattatttcccctggtaaggtgttccgttccgatgatgatgcaacacattctccaatgttcacacagatggaaggtcttgtagtcgataagggaatcacactctgtgacttaaagggaatgttagatgaacttgtaaagaagattttcggaaaagagacaacaacacgtctccgtccatcttacttcccatttacagagccttctgtagaagtagatgtaagctgcttccagtgtggcggatgcggatgtaaactctgcaaaggtaccggctggatcgaagttttaggagcaggtgttgttaacaataaggttttagagggctgtggaattgataccaatgagtacagcggatttgctttcggtatcggtatcgaacgtatcgcaatgttaaaatatggtatcaacaacatcaagttactgtttgagtctgatatgcgtgtgttaaaacagatcgatgactaagaaaacagatagagagaagagaaaaggagacttatcatgttagcaccattaagctggttaaaagattatgtagatatagatgttacgccaaaggagttagaagaaaaacttttctcctgcggattcgaagttgaggagctgatcgaagttggaaaagacataagcggcgttgtcgtaggtcttgtggaatcctgcgaaccgatccctgatacacatttgagcctgtgccaggtaaatgcaggagagcatggaaccttccagatctgctgtggagcagacaatgtgcatgcaggcggcaaatttccactcgcacttgtcggagcaaccgtttatgcaacagcaaaagatcatgtcacaattgagggcgtgatgaagattaaaaaaggaaaactccgcggttacgaatcctttggtatgctctgttccggaacagaacttggattaaatgaggacttatatccgggagcaggttacaacggactgctcgtattaccggaagatgcagaggttggagcagatgtaaaaccaatccttggaatggatgactggatttttgacattgcgatcacagcaaaccgtccggactgccagagcatttacggtatcgcaagagaagtagcggcagtactcggaaaagaatgtaaagagcctgcacttgatttcacagagacagaagtgacaaaagatttccatgtgactgtttctgcacaggatctctgcccaagatatatcgctcattatgtgcatgatgtagagatcaaggaatcaccggcatggatgagaagaagacttgcattagtcggtatcggcggaatctctaacattgtagatatcacaaactatgtgttaaaagagttaggacagccaatgcatgcatttgattatgcatacttagagggcgatgagatcaatgttagacgtgccaatgacggcgagaagatcgtgacattggatgaaaaagagtttgaactaactaactccaatcttgtgatctgcgatggcaaaaagccggttgcattagctggtatcatgggtggtttaaattctgagattcaggataccacaaaagaggttatgtttgagtcagccaaatttgcgcgtgacaacatccgtaagagctccagagcgttaggacagtcttcagattccagcgctatgtatgcaaaaggagtttacgagtacacaaccgttatggcaatgaaacgtgcccttcacttggtagaagagttaggctgtggaaaagtttcctccacacacattgaagtttctaccggaaactcaattgagccaaaagagatgaaagtaagcgtaaaacgtgtgaacggtgtgcttggaatcaacgttcctgacaaagacatcgtgcgtattctttctgaacttaattttgcaccaacaatcgacggtgatgaactgacactgcacattccggcttaccgtgaagatatggattcttatccggatgttgcagaagaagtgatccgtatgtatggatatgagcatgtaacaccaacgttcatgccaactgcaaaagtgaccttaggcggtttgaacttaaaacagaagacggaacttaagatcaaacgtgcactctgcgcagcaggagcttatgaaggaatccattattctttcttctccccttcagaccttgatctgttaagactgccggaagatgcaaaagaaagacatgcgatccatctgatcaacccgatcaacattgatctttccctgatgagaacaacacttgcaccgcagatgatccatgcaatggcaagaaaccagaagaaggcaattttagagggaagaattttcgaacttggaaatgtatttattccaaaggcacttcctcttaccgagtatccggacgagagagagacactctgcgttggattgtttggcgaaaatgagtctttctatacgttaaaaggatttgctgaaaacgttgcagacgctttgaatattacattcacatatgaagcagccgagaacactttcctgcatccatatcagaccgcagagattttctgtgagggcgaaaaagtcggatatctcggaaaagtttcctatgagattatggacgaacttgatatgcgtgtaccttgctttgttatggaaattgaccttgcatccctgaaaaaatggtatggaaaagagcagatattcactccattgccaaaatatgcagaggaaaaacgtgatttcgcatttgttgttgacaagaatattacctgtgcacagattgaaaacggcatcaaagaagcctgcaattatgtgacagatgtaacattattcgatgtttacgaaggaatccagcttggagcagacaaaaagagtatggcattctcggttgtattcactccaaacgaggaagaattcacaacggaaatggtagaaggatttgtaaagaaaattcttaagaacttagagaaaacacttgatatcaagcttcgtgcataatatgatagaaacaggacaaagagtcgcgggtgcggctctttatcttgttcagaaaatgataatttatggagaacaatcatggatgtaaaagatttttattatgatcttccgcaggaactgatcgcacaggacccattggaagaccgttccagttccagactcatggttttagataagatcacaggagaagtggaacacagacattttaaagatattgtcgagtatttaagaccgggagactgccttgtcatcaacaatactaaggtgattccggcacgcctttatggtgtaaaagaaggcacggaagcaaagattgagattcttttattaaagagaaaagaaaacgatatctgggagacactcgtaaaaccgggtaagaaatgtaaagtcggaacaaaaattatttttggtgatggaattttaaccggagaagttgtcgatatcgtggaggaaggaaaccgtctgattcagttccattatgaagggatttttgaggaaattcttgatcgtttaggccagatgccgctgccaccgtatattacgcatcagcttcaggataagaaccgttatcagacagtctatgcaaaatatgacggttctgcagctgcgccgactgccgggcttcattttacaccggaactgttacagcaggtgcgtgacatgggagtggagattgcagaggtaacactgcatgtcggactcggaacgttccgtccggtaaaagaatccgatgtgttaaaacatcatatgcattctgaattttacaagattgagcagtcggaagcggataagatcaacaaggcaaaaaaagagggacaccgtgtcatcgcagtgggaacaacaagcaccagaactttagagtctgctgcggacgagaatggtttcctcacagaaaaaagcggatggacagaaatttttatttatccgggatatcagttcaaagtgatcgatgcactgatcactaatttccatctgccggaatccacactggtaatgctggtatccgcacttgccggaagagaacatgtactggcagcctatgagaccgcagtagaagaaaaatatcgctttttcagttttggcgatgcaatgtttatcgtcgataaaaacgcctgagaattacttctttaaggagataaataaaatgtgttcatcattatatcagcagctgattcaaaactggacagcattatttttgaaaatcttggtgatgaaaatatacttaccagtcggaatgaaatgggacaggcgacacaagtggcggcatatttggataaagaaaagccgtgggtgtccaggtaagtaatcagcgaagtaaggcagccgcttagagaaatcctgtattaacttgaaggaagagcggaacagatatcagggaggatatggtaagcttgtgaccaagggcaggcaatttttctatgatgaagagggaaagaaggtttgggaaagaaatctggatatctatgggcgtgtaaaaacggaggaagcattaggtgaaaagaatttaattccattccgttttcagggacagtatgaggatgaagagacgggattgtattataatcgtttccggtattattcgccagaggaaggatgttatacgcagcaggatccgattggattggcaggtggtaatccaactctgtatggatatgtttatgatacattgtgtgagcttgatccatttggtttaggcagaatgccatcgtggatgactactagaaaaggatggcaacgtcatcatcttattccagttagtgtttggaataagtattctatacctcaagaagctggaatgaatgttaatggtgcaaccaatatgacctacttgcctgtggcacagggaatagatttagtaaatccgaatagttctcttcatgtgggatggaacaatgttcatagtgagtacaatcaatatattagtcaagaattgggtaaaattagcaggcttgctaaagaaaacaattggagaaagaggaaaattcaaaaagaaattagaatgttacaaagcgaagtaaaaaaagatttaaaaaaatgagtgataaaatgtcattaaaattatatcaaataaatacaactctaaatcatcctgattgtatggcaggattaaaaaaaatgatggatgatgaaattttttcattttttatattggacataggaaatgaagaaaaaataaaaagaagaagattggagtttgttgcgggcactggttatacactggaaaatattgagaaaacagattatattttttgtccatctgcattgttgttttctaagcgatttgttgaaaaaattggaaatttattgagagaagaaatgaagtttttttcttgtagattagtttgtcaagacgttagtttagaatggtatgccgctaaaatcatactacgtatacctataatagataaagaagcatcaacatatcgtacattaagtgatggtgagagagtggtaaaatttataaagtttagaagagatattgaagaggaattttttattgcgaaagataaagaaagtactacagattttgttgtaagtgaattgttcgtagatatatgcaagagaaatggtttgttaattgattttaaagaagtataggtaagaaaataaattaccagttaaagaggtagaattctgtaaaggagttaagttgccctcttggttatgaacaggtggaacgcatggagttgtgcatcgaataagagaacaaatactgggaaaaatgagaccgccaagtaaaggatggtatacacatgatgaacagatacgagcagaacttgataatttgagaaaagcgttaaatgaggcaagaagtaggggaatgtcagatgttgttaataataagtatcccaatattaataaagtatcagaactgcaacctccaaaatcgacagatgcaaaggtgccgaaaatatgtcaataaaagttaagaagccagaggtaaaaatgaatctttatgaaacagataaagatgtgttgaaaagctttattacaaatgaaaaaatagatggggtatttacggaaaaatacttaattctataaaattttgcggatgattgtagattttcatcagatattcagccggaattaatggaatatttattgccattttatttgagaataattgaagaggcaatcatgcatcagaataaaatggcagaagatatttatagtcagtttaattctatgatttttttaaatcaacaaaattttaaaaattctgtaggagaaaaatatccatatgtaatggaatattatgttgaacagacagtgaaacggatggaaatgggaaataaaacaatactcggtgacatttctttgtttaacacaacaattgcatttgatagaaataatattgtaaagttatttgataaaatttatggaggatctttagcgataaaatattcattctttaagtatatttcagttttgctttttaaggaaagcgataatttgcttgcaataaatgaagaaagaccattttggacgagtgaaatatgggattttgatgcacagttttctgacgctttttttttgaatcaggaaattgttcaatattatgaaaggcatgtgacaagacaagagattgaggaggtatttaaggatataacaccaattttatataatagtttaggaaaggagttaatgaaccttttttcaagtgaaatggaaaagagctttgctacaggaacttttgaaaagagaaaaaaggagtatttacagaagataaattgtagaagtgaaaaatataagtattggacggagtgtttttaggaaacccaaaagggtaaaataaagcgtgtaaatttttttgattttaacccacacatatgaaagagattattctggtcttgttacaaaaattaatcgcccgggagacagatatacaaggtattgttatgacaaattgggacgtgtgataagagctgattattatgacaaaacttatgagaactttacttataataagaatggcgctctaatagaggtggaaaaccaatatggcaaggtaaagtttgaacgagattcgttgggcaggattacgaaagagtggcagggcaggcactggatatctaatcagtataatgaattgggaaactgtattcagacagtaagcagttttggagcaaatatacttaccagtcggaatgaaatgggacaggcgacacaagtggcggcatatttggataaagaaaagccgtgggtgtccaggatggaatataatgctttggggcaggagactcagcgtctgttctctaataatatctgtagtgcatgggattatgataaagctggcagaccgatttttcacgaagtaagtaatcagcgaagtaaggcagacgctgctcatcagggaaatttaggaaatgttgtcggctggtcggatacattgcgcaggcacagatatgaatgggatgtgaattatcagttaaaggagtatatcctatggagggaaggaaaataagttttgtggtactggctatggcaggtctgctgacagcatgtggcagccgtgtgtggggtgatgacagtgaaatttccacagcattagccttcggagaagcagaggagtgtacgcagaatgccaaaacacgggaagatacgattgttaaaatatcagactgcctttcggaacaggtgccggagattgatgactgggctgcttatgtagatctgaagagtgatgggcaggcgtatttatatcaaacatatgatcttgaaacagaggaagtacacaaagatggggcgggaagtgaatatttgggagagtattattccgttcatgtgagcgagatgtgggaggatcacagtgtgagctggagcacgttttatgtgagtgtcaattttgataaggttttatggaaggatatggtaggactggcagacagtgagtttgaagtgtatacattagaggagtggagaaattcgtcgtattatccaagccttgatgactaaacggcgttttgcatagatcctggtatatacaaccggaaatgatgccctcacagcgatcgtcctctatgattaccagccaagccgtaaaggatcctgtgcacagaattttctggatggatttcatggactggtacagtgtgacggataccagggttacaacaggctggaagatgttacactggtatgctgtcttgcacatgcaagacggaagttcttcgaggccgttccagcagccaggagaaaaaagctgaagcttttggacatcaactccgacgtggcaatcgaagatagcaatcttccagatgaagaagaagcagagcagctcacactgatgaattatctactggatggccggtgtgaaatctcgaacaaccgtgccgagcgaaaagccaaaagctatgcgatcggacgtaaagccttcctgttccacacatcagaagccggtgccggagcaagtgcggtgatgtacagcatcgtggaaacagcaaaagcaaacaatctgaatattttccagtacctctatacggtactcctgtatatgccggattacatgaattcgtccgcaggtatagagcagctgatgccatggagtgactttataaaggaacaatgttcagggctgattgacgtggaatctaatgttccggaaaatagaattcccctgactcaagcttaaaactacttgtaatcgcaaagaacttgttatacaattatcttaaatatttcatgaaggagaagtgaggtatggaggagcggagaaagcataagagacttgatctggaagtcatggttgaattagaacggttagatgaagaaagcgtgaccactttgaaatatgtccatgtcgaggtgacagatatttcaagaagcggtctcggatttaaggcaaaggcagatcttgagattgggagttattacgatacaaggattcagatctggacgaaagaagttgtggatgctgttattgaaatcgtccggagagatgctttgccggagggcggttataaatatggatgcaggtttattgggatgacggatactgacgcactcaagatagatatttaccagatatttaatgatctgtaaaagaaccggggatcctatactacaatgcaggagtatatcgctatgtcgtttcaaaaaataaaatcatctacatcacggtgttttgatatcagcacagcagcattgcatatcattgcaatgctgttcatgctgatggatcacctttgggcaacacttcttccggcgcaggaatggctgacctgtgttggcaggatcgcatttccgatttttgcatttatgtcggtagaaggttattttcatacccataatttcaaaaagtacttattgcgaatgctggtttttgcagtgatctcagagataccgttcgatctgatgtatggcggaacatggttttatccggttcaccagaatgtgatctggacgtttatccttggtcttttaggaatccatataatggaaacagtgcgaaagaaaaagaaaacacctgtttttgtactgacagccatactggttacgattgccggaggtttacttgggacactgacaatggtggattactatggaatcggtgtactgacagtttttattttttactttttccgcggacgcaaatggtggtgtctgcttggtcaaattgctgctctttattgggtaaatgtggaattgcttggcggattaatgtatccggtccgtttgttcggtatggagtttgaactctgccagcaggggcttgcattgcttgcattagtgccaatctggctttacagaggacgacagggatatcacagcaaaccattccagtatttctgctatgcattctatccggtccacatgctcattctggtgctgatactgggctttgtgaaccggtgatctgtctgatgttgactggtcaggagaatatttttaatttgttgtctcccggcggataaggataggcgtaatttgtttatggatcagttctgccagcggaactggttttctctttttacgttcttccatctgctggactaataattccatggaggtttgtgcgatcacatcgatttgctgtccaatggttgtaatcggcaaaatagcttcactggcaatcggagagttgtcaaaccctaccagttcatatgtgtcagggagacatccatatttttgaaagattagattcaggaacatattcgcataggtgtcattcgcaagaaagacaccttttttttgcccaggatattttgcatcaatatcagcaaagatgattttcatttgtgaaaaaatatcctgataagaatctccgtacacattaagatttaattcataaggcacatgttgttctttacaggtatcttcaaatgcacgaattctgttgtaggcaggaataatctttggcacatctgcattaatatgaatcagcacatcacaatggtcacggatcaaaagtgatgcagcctgcagagctcccatataattatcagttgtgacactgcagatatgttctgcctcacgttcaattgctatgacaggaatctgataagaagcaagcttttcggaagaaagcgtatggcttaatacgatcaggccttcaatctgataagacatcaattcttcaatatactgctcctcctcatctggtccgttatcactgacaaaaacaagaaatttataatgataatcacggtagctggaaagaagctgggtaagcatttctgagtagtagtgaaggtaaagatttggtacgataatcccgataaattcacttttcccatttgcgagcacctttgcaagtttgttctttttatatcctaaatcctcaagagcctgtgatattttctcctgattttcaatcgtcagtgaatccggatgattaaaatatcttgaaattgtagttttggaaaaatgcgtgtattctgcaatgtcagcaaatgtcacctgttttttcgccataagtatgtgtctcctttacgcattgtctattgtatttatcagtatgttaaaatatgaatcgtttcgttacagtttcatattacacatagtatagcaattaagttctggaatatcaataaaaaaataactggttacgtaactggttactttaatttaaaaaagtgttgacatctattggaaaataggttattatccaattataaagtaaccggttactttaccggttacacaataagactaaatggaggaagagtgtatgaaaagagggttgaaacaaaaaaaatttacaagcagacaaacacttgtaagtaaagtttcctatgtcaaaaaaaactggcaattgtatatttttttcctgatgccagcattactgttaacaattatatttaagtatcttccaatggggggattgctcattgcattcgaagattacaatgtgatcaaaggtgtttttggaagtccctgggtaggcctggaatacttcaaacggtttttatcttcaccggattttatgagttatctgttaaatacattaaaactcagtatttatggactgctttggggatttccaattccgattatcctggcattattattgaacaggatccgcaagcaaggcatcaaaaagaaaatacagcttttaatctatgcacctaactttatttcagtcattgtactctgcggtatggtacgcatgtttttatcaccggtcggtccgatgaatcgtattctcggtatcactacaaattggatgaccatgccagctgctttcaggacaatttacatcgcaagtggaatctggcagggagcaggatgggcatctattatgtacacggctgctttagccaatgccagtaaagaattagaagaagccgctgttatggatggtgcaaatctgttgcagcaaatctggtatgtcgagttgccggccattaaagatattattgtaattcagtttattttgcaggccggaaacataatgagtatcggatttgaaaaagcatacgcattgcagactgatatgaaccttccggcatctgagattttatcaacttatgtgtatcggataggtcttctgaatggagactacggctactcaacggctgtcggattgttcaactctgtcattaatgttattttattgattttcgtaaattttgttgtaaagaaaataaacgatggagaaggcttataggaggatgaaaagatggaaacatcaagaaaaatgaaatattcgagaattgaccgtctgattttaggtatagcatatgcgcttctcggtttgtttgttctttcgattgttatacctttgatatatgtagttctggcatcttttatggatccgactgttttaaataatcagggactgagttttcggataaaagactggacattagatgcataccggcgtgttttagagaatgaaatgatatggagaggattttttaattcatttttctactcgctggcatttactgcaatttctgtttttataacacttcttgcagcttatccgatgtcaaaaaaagaatttgtcggcagaaacttttttaatgttatttttctgatcactatgttttttggtggtggaatgattccgacatttatattaatcaaccgtttacatatggtgaatactgtatgggctattttaatacccggagcattcaatgtatggaatatgattcttgcaagaacttattaccagtcaataccaaaggaactcagagaggcgtcatccattgatggtgcaaatgaaatccagcattttttcaaaattatgattccggtatgtaaaccaatcatcgcagtactggcactctggtcttttgttggaatgtggaacagctattttgatgcactgatttatttgaatgatgcagatctgcagccattacagcttgtgcttcgttccattcttgtacagaatacaccacagcctggaatgatcgctgatatccagagtacggctgagatggcaaaagtagcggaacagttaaaatatgcgactattgttgtgtcaagcttaccattattaattatgtacccatttttccagaaatatttcgataaaggaattatggttggatctgtaaaaggttaaagaagggggacttcctatatgcgtagaaaaataaatagaatgttgtcattcgggcttgcactgatcatgatgtttagtatagccggctgcggaagcaatgcacagccacaggcagagatagatccggacactccggtttccgaagtacagtttccgttaaaagaaactgaggaattatcctttattaccagtgcaccggcgacctcaacgcaggatccgaatgaaaggatcatttttcaaagacttgaggaacagacgaatgtgcatattaaatggacgtgttttgtatcggatcagttttctgataaaaaaaatcttgcattagcacaatttggcaatctgccggatggcttgtttaatgccggaatgagtgattacgatctgcttcgttatgcaaagcaggggattattattccccttgaaaatctgatcgataaatatatgccaaatcttcaggctgtatttgaaaaatatccggaataccgcacaatgtgtaccgcaccggatggacatatatattcatttccatggatcgaacagcttggtgccggtaaagaagccatacaggccatcggagatatcgcgtatatcaataaaaaatggctggattatcttggattggaaataccaacaacaacggacgaactggaacaggtattaattgcattccgggatcatgcggatgaattgcaggaagaatttgatattgaaggtgatgtgataccgatgtcctttattatcaacaatggagatcaggatcccgccattctgatcaatggatttggagaaggctatggtgataccggtgatcattttgcagtgacggatgaaggaaaggtcatttacacagctgttcaggaagggtataaagaaggcattgaatggctgcataaattagtaacagaagatcttatagatccggaagcgttcacgcaggaatggtctacctatgttgcaaaaggtaaaaaccaccgatatggtctttgcttctcctgggatattgcaaatattgataacaatgttgattatgtaatgctccctgcacttacaggtccgacgggtgtgcggaatatcacaagacaaaacaatagtgagaccagtggctttgacagaggacgctgcgtacttacgactagttgcagaaatactgcacttgcagcagcatggatcgatcagatgtatgcaccattacagtctccgcagaataactggggcagctatggtgagaatgattcctttaacatctttgaaatgtctactaatgaaaaaggtgaaccgatgttaaaacatatggatttaggcgaccagtctccggtagaagtccgcgaggcacagtcagtcaatggtccgcttgccatcttaaatgaatattatggtgagtatgtaacacagccggaagatgcaaaatggcggcttgacaatatgcatgagacatatttggcagatatgaacagtaaatacgtttatccgaatgtatttatgagtatagaagacacgaataaggtgtcgcaatatgacacagatattaaaaaatatgccgaacagaaaaaagccgactggattttaaatggcggcatagaaaaggaatgggattcctatcttgaaaaaatggaaaaatatggattatcagattatctttccattaagcagaaatactttgacaactatcagaaatcattatcagaataatcaggagagaaataatatgagcaatatgttagaaaaagccagaaaatacgagacagaaaaaattgctgctacagatccgcagacaaaacctttatttcatgtttctgctccaaccggatggatcaacgatccaaatggattttcgttttatgatggacagatacatctgttttatcaatatcatccatataacagggaatggggaccaatgcactggggacatagcgttacgtgcgatatgatccactgggaacagcttccggcggcacttgctccggatgaagaatatgataaagccggatgcttttcaggaagtgcgatcgaagcagatggtaaacatgtacttgtatatacaggagtaaccagaataaaacagcctgacggaagtgagcaggatcgtcagaatcagtgtattgcatttggtaatggaaaagattatcagaaatatgacaaaaatcctgtcatgaccggagaaatgcttccagagggatgcaacagggcagatttccgtgatccgaagatctggaaagaaaatgatacctattatatgatcgttggcaataaaaatgaaaatcagatcggacaggttgtgttatgttcaagcaaaaatctgaccgactggaaatttgaaacaatcctagcttcaaacgaaagcggaaaaattggtacaatgtgggaatgtccggacttctttcagctgggcagtaaaagagtgctgatctgttcaccgcaggatatgaaagcgcagaaatatgagtttcataatggacataacagtgtttattttcttggggactatgatgaaaaaacacatacatttgtaaaagaattgccgcatgcacttgattatggaatggatttttatgcaccgcagacagtagaactgccggacggcagacgtattatgatcgcatggatgaaatcctgggatgcatgtgtgattccaaattcacaggtttggcagggaatgatgactctgccgagggaattggaattaaaagatggtaaaatctggcagacaccggtgcgtgaaattgaaaagtatcataaaaatccatgtcgatatgatcatgcagaaataaatcaggaaacaacactttgcggaattgaaggccggacgatcgaccttaccgttttactggaagaggatggatttcaaacattttccatgaaacttgccgcaaataaggaatatgaaacaagctttacttattataaggctgaaaatatgcttgagatcgatcgcacttattgcggtgtgacaaaagatgttgtctgcgtgcggaaactgaagatttcaaatccggaagggcttaagaaaatgaggtttattttggatcgtcagtcgatcgaactattcctgaacgatggggagcaggttgcgacaacagccatctgtacgccgttggaagcgcaggaaatccatttttacagtgacaaaaaaatacatattaatgttgaaaagtatagtatagtaaaattataaaacaaaaactactatcagacacggaggaaaaagtatggatgttgtagctttaggtgaattactcattgattttaccgagaatgggatcagcagtcaggaaaatccattatttgaggcaaatccgggcggtgctccatgcaacgtactggcaatgttaacaaagctcggacataagacagcttttatcggaaaagtaggaaatgattttttcggaaaacagctggaacagacgattatggaagttgggattgatgcatcaggcttacagaaagatgatgacgtacatacgacgttagcactggtacatacttatccggatggagacagggatttttcgttttacagaaatcctggtgcagatatgatgctgacagaagcggaagtcccggaagagttgataaagggaacacgaatctttcattttggcacactgtccatgacacacgaaggtgtacgaaatgcaacaaaaaaagcacttcgtgctgcaaaagaagctggtgctgtcatttcctttgatccgaatctgcgcgagccgctctggaactccttagatgaagcaaaagaacaggtgctttacggattaggacagtgtgacattttaaagatttctgataacgagatccagtggctgaccggagaagaagatttcacaaagggtgtacattggatccttgagagatatcatattccattgatccttgtatccatgggaaaagaaggaagccgtgcttactataaagatcttattgtagaagtgaaaccttttatacagaagaatacaattgagacaaccggagccggagataccttctgtgcatgtgttctccattatattttagagcatggacttaccaatcttacagagaatgacctgaaagagatgctgacttttgcaaatgcagcggcatccattatcactacacgcaaaggtgcactccgcgtaatgccggaacgggaagaaatcgagaaattgttagcaaactctaacaatatactttaaaataattataataatgaagtcacaaaaaactctgacagacagaaatgtttgccagagttttttcttactataattgatactacgagtgcaatttccggtgaaatatctgcatttctccatatgtcagaggcaattcactggatgaggcttttcttgacgggcaggaatagttcttacaacctgcacacgaattacataactgatcacggtttgaagcagctttcgtgtccagacgcaggataagcgttgcagtctttaaaggccagagcatcagaccatctgtaagagtgacagatgccggctccagattattatatatctttggaagcagatccatagaataggtatctccgagaaaagataattctacaagattcagtccggttttccgttctgccagatatgcaaattcctcgtatgcttttgacaggagcatgagactgatacagtctacaatatacgcttcttccagttgttcatgattcagatataattctgacaattgatccacaccattcccaagtgtaacgattccgtatacatagtttgtaaatggaatttcatccatatcctgggtaagcgaataatatacatacgaatctacaagcggtaagagtgcggtatatatcgtctttatatagtgcagtttttcagcaggaaaatgaaaacgttcacacaattctttccagtcagaagatgataatccaggattaagcttatttttcatgcttcatatcctcatgtcctgaatctgcagccaatttggcaatttcctgaaatcgggctatgatcttatcataattattacgttgatgtggaaagttacaattcatgcaggattttattccgtttttcagatattcacagtttccgccacaggatttccccaatgcatagagcgggcaatagcaaaacagacagttaaagtcagcctccgggattcctttatggcatggaaaatattcacattttttgttttggaaaaatttataatattcactcatagtattgttatcatttcatgttttaagaagtattctggttaaaaggattctttctgtaaagtaaaataagagcggtaaaacctaccgctcataaatggtatagtgatgtttcctcagcagcaaaattgcggaatctaaagatttgcggtcgtacatctctaaacgcagtacaccgtcttcaaattcacggttgtggatgatgccgatatttttaatgcttaagttattgcttgcaagaatcgtggcaaccgttgcaattccacctgcctcatcgagaaggtctaagtacagttcatagatttccttgattggacctttatttgtgatcgtgatggaatccctatagtctttggctgactgaaagtctgtcagcagtgcatccgcatttgagattaaaatatcatgttttgttttttcaagcatcacttcgtagtcatcaatcagccgcacaatctgttcgctgttggactgacagatattctgccacataacaggagaggaggaggcaattcgggtaagatctttgaatcctccggcagcaatcgtcttcattgtctcatttgcgtcatctgattttttaacaaggttgacgagactgtacgcaatgatatgtggcagatggctgatagcagccgtagcataatcatgcagatgataatctaatacaagggcaaccgcaccaagctctgtcacaagagaacggaattcctccagacgttctggggaggttttgctcgtcggtgtcagaatgtaatatgcattttccaacagatactcatttgcgttttttaatcctgtcttttcggagcctgtcattgggtggccgccgataaaacaatcttccatatcaagagcaatcacttcctcatggatatctgttttcacacttccgacatctgtaatgatgcagccctctttgatgttgccttttaaactgcgcaggtattcgatatttcttttgaccggtgtgcacagaaaaatgtaatcgcagtcataaaaatctttgatctcacataaattctgattggagatcagatgttcttcgtaagcttctgtaatggtttcctgatgaccggcagttgcgataatggttacatcagggtaaagtgtatgaattttttttgcaatggacccgccaatcagaccaagtccgataaatcctattttctgaaacaaatcatgttcccccataagttatttttgtatatttagaaagtcttatacatcatatccacatttcatgaaaaagtcaacacgttaaagtataaaagtaaacgagtctttcctgtcttagaatcagcataacgtctgttggaagaaaacggagcacatttctctgaatatgtacaaattgttaatattgtgtaaacaatcaaaaataaataggttaaaatgttcaaaatacatacataatatataaacattctcctgttaatataatattagttagtaaatatgaataaatatattgtaaaaaaacagataatttagtaaaatataaccattaaaaacattcaggaagaacaaaagtgatcctgaacgaaaaaatgtatgggaggatttgctatgaacgtttacacaactgacaaaattcgtaatgtggttctcttaggccatgggggatctggcaagacaagtcttgtcgaggcaatggcttatcttgcaggaatgacaacccgtatgggaaaagtcgcagacggtaacacgatcagtgattacgacaaggaagaagcaaagcgtcttttttccattaacacttccgtagttcctatcgtatggggtgatacgaagatcaatatccttgatacaccggggtattttgattttgtaggggaagcggaagaggcagtgagcgtggcagatgcagcgatcattgtagtgtccggcaaagcaggaattgaagttggaacgaagaaagcctgggagatgtgtgaaaaatacaaacttccgcgcatggtttttgtaacggatatggatattgacgaggcaagttacagacaggttgtggaagaccttcagcagatgtatggaaagcgcattgcaccatttcatcttccagtcagggagaatggacagtttgttggatatgtcaatgtattacagcagagagccaagagatggaaagaggacggaacagtagaaaaatttgaggttccggattattccaaagacaacctgaatatctgccgggaagctttgatggaggcagtggcagagacaagtgaagaatttatggagcgctattttaacggggaggagttctcggaagatgagatccgtcaggcactccgcgtgaatgtggcagacggaagcattgttccggttctgatgggttctaacacattggcaagaggaatgtatacactgcttgtcgatattgtgaagtatctgccaagtccggagaaacgttcctgtaccggtatcaatgcaaagacgaatgaagtttacagtgctgattatgatttcgcaaaaccaaaatccgcatatgtatggaagacgatcgtagatccgtttattggaaaatattctctgatcaaggtgaactcaggtgtcttaaaaacagatgatgtgttatacaaccaccacaaagatgttgaggagaagattggaaagttatatgtgctctgtggcaataaaccggaggaagtgaaagaacttcacgcaggtgatatcggtgcactcgcgaagttaacaagtccttctacaacggattccctttccacaaaagccaatccgattttgtatattcgaacctcaatctccacaccatatacatatatgagatataaggcagtgaataagggcgatgaggataagatctcacaggcacttcagaaactgatgatggaagatcttacgttgaaagtagtcaacgacagtgaaaacggccagacacttctttatggaatgggcgaccagcatttagaggttgcagtcagcaagctgttaaaccgctacaaagtagaagttgaactcaagaaaccaaagatcgcattccgcgagacaatccgcaagaaggcagatgtcgagtacaaatataaaaaacagtccggcggacacggacaatacggacatgtgaagatgacatttgaaccatccggtgatttagaacagacgtatgtatttgaacagaccgttgttggcggtgccgttccgaagaactatttcccggcagtggaaaagggaattcaggaatcctgccagaaaggtccggttgcagcatatccggttgttggtgtgaaggcagtcttatatgacggctcatatcatccggtagattcttcggagatggcgtttaagaccgctgcaaagcaggctttcaaaaaaggtttcttggaggcttctccggtacttttagagccgattgcatcgttgaaagtagttgtaccggataaatataccggtgatattatgggagatctgaacaagcgccgtggacgcgtgcttggaatgaatccgacagatcacggttatcaggagatcgtcgcagatattccgtatatggagttatttggttataacacagatcttcgttccatgacaggcggaagtggtacctattcctatgaattttccagatatgaacaggctccgtccgacattcaggagaaagagattgctgcaagagcaagcaagttagaaaaactagacgagtaagagaggagaggtggatcaatgaaggtcacaagaaatattttcataattttatatgcagtacttcttgtgatcaatgatccacagattgcccgcgcgcatacgatcgaaggaatcgggatcacacaggcaggtatcattgagaataaacctgtttatgtggagccttatgagagtacagggcagaaagcatatcatatttcctatattttaaatggcggcgagaacagtctctcgaaccgcgaagtctattatgagaaagaacttccggtgacactggatgtcccggtgaaagagggctataatttcgcaggctggtatacagacagcagttacagcaggaaggtaacggatatcacaaagaaaacatcttcggaactggttctttttgcaaaatggacgaagacgatcgacagttatttaaatgttgagatgtattcgtatcataccggaaatcttctcgcaatgaaccagaaagaactgcgccagtgcagctataatttcatggacgaattatccataccgggaatgccgtctacgagagaaaaagactatgtcaataattatatcaataccgcagatatgtgtatgcaggggttatgctttacaccggattatgtgatcatgaccgcatacaccgaagataagaatgaatctggggcgctgatggtatttgatcgggaaagcggagactatctggtaacgcttggcatgaaaaaggacagtcatcttggcggagtggcttttgacggagaaaatttatgggtatgccactcgaattccaatacattagagcggatttcctatgaatatatcaaactgattgcagaggatgcaccgggttactgcattgatgcatctgccatttccgatgaatattatctgcggaatacaccttcctgcattacctgctacggtgggcgtatctgggtggcaacttacaataagatgttccgctcgaaaatgtatgcatacacgtatgatacagagctggataagttagttgcactcagcaattataatatcccgtgcaaagtacagggcattgcatttgattcacagggcgctgtttacttaagtacatcgcttggaagaagtaattcctcttatctgaaagtgtattcttccctgattgcattaaatcagaatccggctgtgccttccgttaaggtggagatgccgccatgttccgaagagattgcgattgtggataacagcttatatgtcctgtttgaatcagccagtccaaaatattttgagggaacggacggcaagggaaccagcgtggctccgattgataaagtgttaaaagtgaatgttgcaacgatatggtaggacagtctctaatgagactgtccgcttctttgtttcatcaactgaatgatcttatctgctttttctgcttcttccggtgacatattctgttttaaaatcgaaatcataagttctgtttccggctgcgtgaactgaatattctgctttttggcagaggaaagcgttccgagcaggaacggtgccatatctttcatatcagtcggctttttgctgtttgcaaaattcattaaaaaagagagcttttccggcgagagattctgaaagaccggatttgttttaaaaaaatcattttccattggaatatcctttctgaaattttcagttattcatgatcagccggcaaaaatggtttcgtaggtttcaagcatggaaaacatatttgtcagcatatcaatcgtctctaattcttttggagtacaaaacggacgcagactgtttaagagtgactgcggattattttcttcttccggcagggaacacattgacaaaacctgttcctctttggaaaagacatggagtgtattttgaagctccatatactttattaatatggcgaattgctttttttgtgaacttttcatgtagggaacgaccgtttttaacatttggatctctcttgtctgtgtcatatgatcaaaaggagtaagaggtgttgattcgtccataagaaatgcctttttcttttattttatgtgtgaaaacctgcaatatgcaaaaaaaggagtttcggaaatgtctgcccggcataagatgatagggaggaggatgatatcatgttagtagtggagaataacagcgtttatgaaatagatgaagaatgtttaaaaagaaggaacgtaccaaaagagtgtgaggtctaccagaaaatcgtgcgggagcgcgaacaaaaggaacagaagcaaaaacagggcgcagggaatcgaaccgtcgaaaaaactggaaggagaaagaataccgattttaccgaagaaaattgacagaaacagaaaaaagagcggaacccgctctttttctgtttctgcttctaaggaattagcagaagccgtttccgttaccacatccgccgcagcagagaagaagtaagatgatccataagcagtcattaccgccacatccgttgttgttaccacagaaaccgccgttgttaccgcagcagcagctcaataaaatgatgatccagagaatagaactgcatcctccttcattacatccgcatccaccacagtttgttgcagctaaatcactcatgttaaatcctccaaatttttcttacactgtatcttatggaagcttagaaaatgtgttactgtttttttaaaaaaattatttttgctatttgctattgagatacgaaaacgtgtttgctatgatagtgataattacaaaagcgttatgtgaagtcacaaagtacacaggaggaagactatggagtttgtagtcattgtagagccggatgaagtgggaagaaagaggttagagtctgttttccagacagagaagccttctttttcctataagatcacagagagcccggaagtggcaatcgggttattagaacaacagcatgttgatgtgttagtctgcgagacgcatctttctgtgatcagtggaagggaattcttttccatggcaaagatgatgtcgccggatacgatccgtgtggcaatgacgaatgcagaacatgtaaaagagattatcgattttttaaatgagtttgatgtttataagatcattatgaaaccgtgcgcatcctttgaagattttatggaacctgtgaatgcagcgttagaatataaccgtttgaaaatacaggcaaaattagatctcgaacaggcgaatctcaatatctttttctcggaggaggattttaaccggttagaggaaggacagcaggagaacataaagctgtatgagcaggcggctgatgttgtcatgacgatgttaagacagcattttacagtggaagaaatgggctcgaagggcgaatatgttgtcgaacattatatcagagatcttttatattattatctggaaacgatgattcatggaaatggcaattaccttgtcggctataaccagctgaagaacgaattttatcacgaagcagccggacgaagtttccggatggagaagaaaaaggactgcgagattccaccggagattttcagaaaaatactttttcttctgatgacactgacaaaggcatgtgcacagatgttggaaaaatatgcagtttcggttacgttagaaacagcatctgaaaagttttttgtagtacgtttctgctgtgactactccgggagtctggatgagaatgggaaaattatgtattcagagcaatacagtgcgttccggaaagacatggcagacctgacggaaaaaatcgtagacagtatcgtgtatcgcacggtttctatggaaaaagaacacaagtatattctgaactgtgcaattgaaagaaagcaggaatagaacagattcatggcagaaaaacgaaccataactaattgttatggtaaatatgaaatattatgccttgacaaatggtaacaggagtgcctacaatatagaaagtataattgtatacaattatgcatgtaaaaatagtcaaatattttgcatatatattcagttgctataaggaggatgttatgagagaagttgtaatgaaccaaaagacaaacctattgcagttagaagaacatttctatcagcttgtggatgtggaagaaccaaatgtattccataatctgtttccttatgatgaaattccaaagattgcgttcaatgaccgtattgtaccgcacaatatgccggagaatatctggattacagacacgaccttccgtgacggtcagcagtcgagggctccttatacgacagagcagatcgtaacgatttatgattatttacataagcttggcggtccgaaaggtctgatccgccagagcgaatttttcttatacagtaaaaaagaccgtgatgcagtttacaaatgtttagagcgcggttataagttcccggaagtgacaagctggatccgtgcaagcaaacaggacttccagttagtaaaggacatcggacttcgtgagacaggtattctggtaagctgctccgattatcacattttctataaaatgaaaatgacaagacgtgaggttatgaacctttacttaagtgtcatccgtgagtgcttggagactggtatcagcccaagatgtcacttggaggatatcacaagatctgatatttatggttttgttatcccgttctgtgtggagctgatgaagctcatggatgaatataagatcccgattaagatccgtgcctgtgataccatgggatatggtgtgaacttcccgggagccgtgatccctcgaagtgtaccgggtatcatctatggacttaccacccatgcaggtgttccgtctgaattgatcgagtggcatggacacaatgacttctataaagcagtcaacaactccacaacggcatggctttacggtgcaagtggtgtcaactgttccctgtttggtatcggggagcgaaccggaaacacaccgcttgaagcaatggtatttgaatacgcacagttgaagggtacgctagacggcatggatacaaccgtgatcacagaacttgccgagtattttgaaaaagaacttggttatgtgcagccaagccgtactccgtttgtcggaagcaatttcaatgtcacaagagcaggaatccatgcagatggattgttaaagaatgaggagatttacaatatctttgataccggaaaattcctaaacagaccaccattggtatccgtatcaaacacatccggtcttgccggaattgctttatggatcaattcttattatcatctgccaaaggaaaaaggagtagataagaactctgaactcgttaaaatggtaaaagtatgggtagacaaacagtacgaagaaggacgtgtgactgtcctgacagataacgagttagtggaagaaattggtaaatgctgtaaaaagttaaagatagatattttggagagataagtatgggagaagacaattactctttaggctccagagtctttcatatgatccgggaaaatattctttccggaaaatacgagaaggacgaggaactgaaagagaaatcaatcggtgaggagcttggtgtcagcagaactcctgtgcgtgaggcacttcgccagttagaactggaaggtctggttaccattattccaaacaagggcgcttacgtcgttggaatatcccagaaagacatcaaagatatttacgagatccgaagccggttagagggactgtgcgcaaagtgggcggcctgcaacatcacaaaagaacagttagacgaactggaagaaaatatatttttatctgattttcatgcattaaagggcaatgcagaacagatggtcgagttagataataagttccatgaagtgttatataccgcaagtggaagcagggagttacgccatgtgctttctgattttcaccattatgcccagcgtgtcagaaaagtgacgctttctgacaagaacagggcagtggattcgaacaacgagcaccgcaagatcgtggaggcgttaaaacagcatgatgcggaattagcggagaagcttgcaaaccagcatatcatgaaaaccattgagaatatggatcattatggctgggataatttgctaaaataaagactggaaggcagaaaggaaaaataagtgatggaaaaaattaaaatgacaaccccgttagttgagatggacggagacgagatgaccagaattctctggcagatgattaaagatgaattattgatcccttttatcgaccttaaaacagactattacgatctgggattagagcaccgcaacgagacaggcgatcaggttacgatcgattctgcaaatgcaacgaaaaaatatggtgttgcagtaaaatgtgcgacaatcacaccgaatgcagcacgtgtaaaagaatacaatttaaaagagatgtggaagagcccgaacggaacgatccgtgccattttagacggaactgttttccgcgcaccaatcgttgtaaagggaatcgagccatgtgtaaagaactggaaaaaaccgatcacaatcgctcgtcatgcgtatggtgatgtatataaggcatcagagatgaagattccgggaccgggaaaatgtgagcttgtatacacagcagaggacggaaccgagacaagagagctcatccataattttactggggcaggtgtagtacagggtcagcacaatctctgcaactccattgaaagctttgcaaaaagctgcttcaattatgcattagatacaaaacaggatctctggtttgcaaccaaagacaccatttccaaaaaatacgatcacacgttcaaagatattttccaggatatttttgacgcagaatacaaagaaaaattcgaagaggcaggaattacttacttctatactctgatcgatgatgcagttgcgcgtgtcatgaaatctgagggcggatatatctgggcatgcaaaaattacgacggagatgtgatgagtgatatggtatcgagtgcgttcggttctcttgccatgatgacctctgttctggtatctccacagggttattatgagtatgaggcagcacatggaacggtacagcgccactattacaaacacttaaaaggtgaggagacctccacaaactcagttgccacgatttttgcatggacaggtgcattaagaaaacgtggtgagatcgacggcataaaagaattacaggattttgcggataaattagaaaaagcttgtatatctaccattgagagtggtaaaatgacaaaagaccttgcgctcattacaacgttagagcatccgactgtattaaacagtgaggatttcatcaaggcaatccgaaccacattagaaggaatgttataattatgattttatcttgtcagaatatctcaaagtcattcgggactgacgaaattttaaaaaatgtaagctttcatattgaagaaaatgaaaaagcagcggttgtcggcatcaatggtgccggcaaatctacgctgcttaaaataattatgaaacaggaaaatccggacgagggcgatgtgacgctcgcgaaggataagacgattggttatcttgcgcagtatcaggatgtttccggtcatcatacgatttatgaggaagttttagattccaaacgggacattatcgaaatggaagagagactgcgaagcatggaagcgcagatgaatacattgtccggggatgcgttggagcagcttttagatacttaccataaattaagccatgattttgagcaggtcaacggatatgcataccgcagcgaagtgaccgggattttaaagggcttagggtttaccgaggaggagtttgacaagaagatgaatgaactctccggtgggcagaaaacccgtgtttcacttggaaaacttctggtgacaaagccggatgtcctgcttttagacgagccgaccaatcatcttgatatcgaatcgatccgctggttagaaacatttttgctgaattataaaggggcagttctgatcgtatcccatgaccgctattttttggatcgcgttgtgagtaaagtggtggagatcttccagcacaaaggctacgtttatcagggaaattattgggactatgcgaagaaaaaagccgcgatccgtgcggctatgatcaaacagtactataatcagcagcgtgagatcaagcatcaggaagaagttattgcaaagttaaagtcttttaaccgtgaaaagtcgattaagcgggcagagagccgtgaaaaaatgttagataagatcgagcgcattgaaaagccgaccgaagataacacggatatccgtatcgtgttagagccgaatgtagtcagcggaaatgatgttttgaaagtggaaggacttgcaaaggcatttccaccgttgcagctttttcagggaattgattttgaggtaaaacgcggagagcgtgtggcactgatcggcaataatggaaccggaaaaacgacgatccttaagatcatcaatgaactgctctcaccggatgcaggaacggtaacgcttggaagcaacgtccatatcggttattatgatcaggaacatcagcagcttcatatggaaaagacgatttttgatgagatcgcggatgattatccgaacctgaataacacgaaggtgcgcaatgtgctggcagcgtttttgttcacggatgatgatgtttataagcgcattgaggacttaagcggtggcgagagaggacgtgttgcacttgcaaaactgatgctttcggatgcaaactttctgatcttagatgagccgacaaaccatttggatatcacttccaaagagattttggaggaagccttaaaaagttacaccggaaccgttcttttcgtgtcacatgaccgttattttatcaaccagacagcaacgcgtattctggaactgaccggagagacggttgtgaactatatcggcaattatgattattatctggaaaaacacgatcagatgatgtctttatatgtgaaaaaaccggaagcaaaaaccacgtctgatgaaacacctgtcagggaaacggcacagaaagtggactggcagacacagaaagcagagcaggcgagaatccgtaagattgagaatagtctgaaaaagacagaggagcggatttcggaactggaaggcaaaattgcagagatcgatgaggaatgtgcaaagcctgaggttgcagtaaactcggcaaaattaggcgaacttacgaaacagcagagcgaataccgggaagaacttgacaggcagtatgagatgtgggaagaactttcgttacagcttgctgatacctcagcacagtaatgaaaacttttcgcagaactttttacagaaagaactactctgttaaaagtttaacagattgacatatgaagttgaaataactataatagatgtgatgcatcgcggcagaatgagaaaactgtcgtgaatgagagatacttcgggaggggcaaaaaatgcaggaaaaagaaatttcccaggcagttatccgccgtatgccgcgatattaccggtatttaggtgaattattagaggatggagtggaacgtatttcatcgaatgacctgagtaaaagaatgaatgttactgcttcacagattcgccaggatctgaataattttggtggattcggacagcagggatatgggtataacgtaaagtttttatatgaagagatcggtaagattttaggcttaaaccagaagcacaatattatcgtgatcggtgccggtaatttaggtcaggcactcgcaaattatgtgaagtttgagaagcttggttttgtgatcacagcactttttgatgtcaacccggcattagaaggtgtgacagtgcgtggaatcaagatccatatgttagatgaactggaagattactgcaaagatcatgtggttgacattgcagcccttaccatgccaaaggagaaggcggatgcgatcgcaaaccgtctggtagatcttggcattcaggcaatctggaatttcgcacatgtagaccttgatctgattgataaagatgtggttgtggagaatgtacatctttccgacagtctgatgcagttgtcctataatattgtaaaaaataagaagaataagaataactaatgacaagatagagctgccgtacacatttttatgcacgacagctctatcttatcaatatgcctaagaggatgaacgtgttatgaagtatctggtaaacagcagagagatgaaacaatatgacacaaatacaacagagcatttcaaggtgccgtcactgcttttaatggagcgtgcagcactcgcggctttcgaggagattaaaagattatgccctgaaagccacaggtttctgatcgtctgtggtacaggaaataatggcgcagacggacttgcactctcgcgtatgctgtatctggacggacaggctgtgcagacagtgttgatcggtgataagaagaaggagaccgcgcagtgcaaaaaacagcttgagatcctttcggcttatgggattcctgttctggaagccattccggaaaatgtggcatatgatgtaataagactgccgagcgaagcgagtgtagataaagatcatgaagctatgcttcatgatataatagtggatgcagtgtttggtgtcggactttcgagaaatgtagagggcatctttgcagaaacgatagagaagatgaatggattgtcgggaaaaaagattgcattagatatgccgtcaggaatctcggcagataccggtgcagtattaaattgtgcatttcgtgcagactatacgatcacttttgcctatgagaaggttggcatgcatcttttcccgggaaatgaatacaccggtgagatcgtgacaaaacagataggaatcacggatgagagctttttggagagaaagccgggtgtgactgcgttagaaagagaagatttaaaacagcttccaaggagagcttcccattccaataagggaacttatggaaaactgcttctgatcgcaggaagtgttgatatggcaggcgctgccattttaagtgcaagggcagcttacacagcaggctgtggacttgtccgcatttttacgccggaggaaaaccgtattgcgattcagataagtgttccggaagcaatccttacaacgtatcatgcgaaaaaattagaagtatcagaacttttagaagcgatgaaatgggcagatgtgattgcctgcggaccggggattggaaccggggagacagcgcatcagatcgtgaaaaatgtgctgcgcaatgcgtccgttccggttgtctttgacgcagatgcactgaatattatcgcagaggatacaaatattttactttctcctcacacagaaatggtcgtcactccacatttgggtgagatgagccggctgaccggagattcggtcgcctacatccagacaagactgatcgagactgcagaagaattttccagacagtataatgtgatctgtgttttaaaggatgagcacacggttgtcagtattccttatggcagaacgtatttaaatctttcgggaaattgcggaatggcgactgcaggaagcggagatgtgctgaccggaatcatcggatcactgttagcacaaaagacagatgcggaaagtgcaacggcatttggaacttaccttcatggactttccggagatactgcattgaaaaaatgtggctttcgtggtatgattgcaggcgacattgtaaatggtctgaaagactttctcgcagaatggcagatgtgagcaattcatgaaaatagaaaggtatggatattataatgaacaaacacagcagagtgtgtgcaaatatagatctgagtgcaattttgcacaatatggaggccatgcatcagaatattgatcctgacacaaaaattatggcagtgatcaaagcagatggttatggtcatggagcgattccaatcgccagagagatagaacatttagactatctttacgggtatgcggttgcaactgtcgaggagggaatgatccttcggaataacggaatcaaaaagccaatcctgatcttaggatatattttcccggatcagtatgaagaagtcatccaggcggagattacgccaagtgtattcacattagaaatggcaaaagatctttcggctgccgcagagaaggtcggaaaagactgccggatgcattttgcaatcgacaccggcatgagccgtatcggatatcaggtgacggaggaagcagcagatgagatggcgcagatcgcgaagttcccgcatatgatagtggagggaatctttactcattttgccaaggcagatgagtatgataaaactttcacaaaagaacagattcagaaatttaagaaaatgatcgctatgctcgaagaaagaggcgtttccattccgttaaagcactgctcaaacagcgcgggaatcgcagagatccgtgaggcaaatatggatatggtgcgtgcaggaatcactttgtatggattatggccgtctgaggaagtagaccgcaattcacttgatcttcgtccggtcatggaattaaaaacccacgtgtcctatgtcaaagatttagaggcaggcagagcgatcagttatggtggaacattcattacagagcgtgacagcaggattgcaaccattccggttggttatgccgatggatactgcaggggactttcgaataccggaagtgtcttgatccatggaaaacgtgctccaatctgtggaagggtctgtatggatcagtttatggtagatgtaacggatattccggatgtgaagatcggggatgaggtgactttgatcggcagggacggagaagaactcattacgatggaagaggtcggcaatctttccggaagatttaattatgagttcgtctgtgttttgggaaaacgtattccgcgtgtctattataaagacggaaaaatgattagcagtcaggaatattttgaagaggaataaaccggaaaataattttttgaaaatagaatacgaccgttaaatatggaaatactatccgtaagaaacaacagtagagagaatactgagtaagattatggagtgtagagcatatgttgattcggcgtggagatattttttatgcagatttaagacctgtggttggttctgagcagggtggggtacgcccggttcttatcatacagaatgatgttggaaacagacacagcccgacggttatctgtgcggcgatcacttcccagatgaacaaagcaaaactcccgacgcatgtggagttagactgtaccaagtatgcactggtgaaggattccgttgttctgttagaacagcttcgcacaattgataagacaagattaaaagataaagtatgtcatcttgacaatcagatactgattaaaattgataaagcattggaaataagcttagagcttcttacataacttgactattctggagcaaaatggtattatttcaaatgttttagtacaattacaaggcaatgaggaggatttatggacgatggtggcagtcccactaccgggatgaaaaaattcagcaacagacttatgaagctgtttggagtagacaccgatgatgtgacagaagaagagattatctcaatggtgaatgaaggacatgaacagggtgtcctgcaggcaaatgaagcggagatgatccataatattttcgagtttggagataaagatgcgaaagatattatggtgcaccgcaagaacatcatagccattgacggaacgatgacgttccttgaaatgctggatttcacgattgctaataactattcgcgatatccggtatacatagatgatattgataatattattggagtgcttcatattaaggaagtgcttgctttatgccagaaacaggagatttatcatacaccgatcaaagatatcgaggggttggtgcgtgaggttgattttatcccggaaacgagaaatatcaacacattatttaccatgatgcagaatgcaaaaacacatatggtcatcgtggtagatgaatacggacagacttccggaatcgttgcgatggaagatatccttgaggagatcgtaggaaatattgaggatgagcacgatcaggaagaaaaaatgatcgagaagctgccggacggaagttatctgatggatggcatgacttctgcggaggaagcgttagagattttgaaagttcatattccggatgaggacgaatatgaaacgttaaatggtatactgatctctctgttagaccgtattccgaataatgacgagaagtttgagacagatgccttcgggtatcattttgaagtgttgcaggtggaaaataagatgatcaaaaaagtgaagatcacaaagcttccagagggaacttccacagacaaagacgagaactcttgccagaaagaggaaacggtgctagaataatgattctgagagattttgtaattgtgtgcaaaatacatacaatatagaagcgtttgacagacgaaaaaatagaaaaagagaggataaaagttatgtcaggacattcaaagtttgccaatattaaacataagaaagaaaagaatgatgctgcaaaaggtaagatctttacaattatcggtagagagatcgcagttgcagtaaaagagggtggtccggatccgtccaacaacttcaaacttgcacaggttatcgcaaaagcaaagagcagcaatatgccaaacgatacgatcgagcgtggtatcaaaaaagctgcaggtgacggaaactcagtcaattacgaattctgtacatacgaaggctatggaccaagcggaactgctattattgtaaaatgtttaacagataacaagaaccgtactgctgcaaatgtaagaaatgcatttacaaaaggtcacggaagcattggtacacagggatgcgtatcttatatgtttgatgaaaaaggtcagatcattatcgcaaaagaagactgcgagatggatgcagatgatcttatgatgattgcattagatgcaggtgcggaagattttaatgaggaggatgactgctttgaagtattgacagcaccggatgcttttgaagctgtcagaactgctttggaaggcgagaatattccaatggcagaagcagaagtaaccatgatccctcagaattatgttgagttatccgcagaggaagatatcacaaatatcaaccgtatcttagatcttttggatgacgatgatgatgttcagcaggtttatcataactgggatgaataaataaaagaaagaaactctggttttcaggttctcatctggaaaatcagagtttttttgcgcacttttttatgataaagtggtagaaatccgagggaaaatggtatatcataaaaagtataaggataatgaggaggtatcattcatgaagcggattctttttgcagcgtcagagtgcgttccatttataaaaacagggggacttgcggacgtatgtggcgcattacctaaggaattttcaaaagaggaatgggatgtcagagtcgtaattccaaattatagctgtattccggaaaagtacagaagccagtttgagtatgtgacacatttttatatgtgtgcaggaaattatatccagaataaatacgtggggattttaaaatacgagctggatggaattacctattattttatcgataatcaggaatattttacctgcgatacaccatatggggatatccgttatgatattgaaaagtttgttttctttgacaaggctgttttatccatgttgaagcagattgatttcagaccggatctgatccactgtcatgactgggagaccggactgatcccggtgtatctgaagaatgaatttcaggcagattccttctactggggaatgaagtctgtcattacaatacataatctgaagtttcagggtgtctgggatgtcaagaccatgaagggactgaccggatttggagcagatcttttcgcaccggacaagttagagttccacaaagacgctaatatgttaaagggcggtctggtatatgcagattatattacaactgtaagtgattcttatgcgcaggagatccagaccgattattatggggaaggactggacggcctgctggctgcaagacattttgacatgcagggaatcgtgaacggaattgattataaggcatatgatccggagacagatccgaagatctataccaattataacgcatctaatttccgtaagaaaaaggtgaataataaattaaagttacaggaagaattagatcttactgttgataagaagaaatttatgatcggtctgatttcaagacttaccgaccagaaaggattagatctgatcaattatgtgatcgaccgtctggtagatgatttcacgcagatcgttgtgatcggaaccggagagccgcagtatgagaatatgttccgccattatgcatggaaatacggagacagggtttctgcaaatatttgttattcggatgatctggcacataagctttatgctgcagcggatgcatttttaatgccttcacggtttgagccttgcggactgacgcagttgatctcgttccgctatggaaccgttccgattgtccgggagacaggaggactgaaagacactgtaaaaccttacaacgaatacgaaaataccggtgacggtttctcctttgcaaactacaatggagaagaaatgcttaatgttgtcaactacgcaaagcatatttattttgataagaaaaaacagtggaaccagatcgttgaccggggcatggcaaacgattactcctggaagtcatccaaaggaaaatacgagggactttacaattatctgcttggatataccgtataaaaacagcataatttccaatactaaagaacaggacagcatagctgccctgttcttttgcaattctctaaatacgaagggagagcgtatggctgataaaaacgaaaaagaaaaggaaataaacgagcagatcaaagattttgggcaggtggagttaaagcacggggaagacaggatttccatgctgacgatcatcggtgaaattgaggggcatgagtgccttccggcagcgacaaagacaacaaagtatgaacatgtacttccaaaacttgcagaggtggaagaaaacaaagaggtcgacggtttgctgcttcttttaaatacagtgggaggagatgtggagagcggacttgccattgcagagatgatcgcatccattcataagccgaccgtctcactggtgcttggtggaagccattccattggtgttccgttagctgtttcaaccgattactcttttattgtgccttccggcacgatggtgatccacccggtgcggatgaatggaactgtgatcggggcgcagccaacgtatgattattttaagcagatgcaggatcgcattttaaaattcattgccacacattccaaagcaaatgcgaatcgtctggaagaacttatgatgaataccggcatcctcacgaaagacctcggaacgatccttgtcggacaacaggcggtggaggaaggactgatcgattctacaggtggaatccatgaagcgtttgcaaaactgcatcagctgatccgggattcacgttttttagtgaatgacaagtaatcaaaattatggtatactaaaaaataggtggcttatggagaaaaattcctatttctttctggaaacaggagttacgatacagcggaggaaatgatttatgacgttattacaggcgattctcatgggaatcattcagggactgacagagttccttccggtcagcagttccggacatcttgcactttttaaaatattattccatgttgagacggataccggaatgttatttgatgtgctgctgcatgttggaacgctgatcgcaatctgtgcggtttattataaagatattataaagctttttgtggaaggactttgcattgtgagagatgtatgcattaatttcgcagctcttatgaagaatctgttccttctgattcgtgaccgtggcagggacaatgcggattacagtccttaccgcagaatcgttaacagcagctatcgcaagttcgttgttttgatcattgtgtcaaccattccaacaggaatcattggttttgtcggaaaagatgttgtggagcaggcatcggaacttctgatcgtgccgggtatctgcctgatcgcaacagctattctgctttttatcgcagaccgctgcaaaggaggcgataagcttccgaaggatattacatacacgaacgcatttgtcattggtatcgcacagggtgtggcaacgctgccgggtttatcccgcagtggaactacgatcacagcctgcctgctcagtggatttaaccggaaatttgcagtaaaatattcatttatcatgtcaataccggcaattttaggtgctatggtattggaactgaaagaatttgcagatatttctgtaagcggcatggatattacatgctatgtagtgggaatggtgatcgctgctgtgatcggatatatctgtattaagacaatgcttgtcattgtgcgcaatcggaaattccgcgtattcgctatctactgtctgatcgtaggagcaatctcaatcggcggatttttctatacattatagacaggacttttttggaggtaatactttggcaacagggaaaagaaagagttcctctggcagaaaaacttctggcagaaaaacgaattcaggacgtaagaagaatgatatgcagcaggagagctttacagaggaagtgattctgtgggtgatccttgcaatttccattttattatttatcagtaattttggaatcggcggggcgattggaagcgcagtcagcagtttcttttttggagtatttggcttaattgcatatgtttttccaattgttttagtaattggtactttttttgcagcatccaataagggcaaccggattgcaacagtcaaaatcgttgcaacggtcttttttgtactttttttatgtatgtttatcgaggttttacgctgtggttctgaagtggcaggagcagttggggcgtatcagtattgctcggtacataaaattggcggcggatttttaggcggactgcttgccggaattttctgcccgaattttggactggtcggctcctatgtgatcgatgtcgtggcaatgatcatttgtctggtgcttatcacagagcgttcggcattaaaaggcgttcagaagggaagccgtaaggtttatgaatctgctaaggagagcaatgagcgtcatagagaacttgcggaacagcgcagggaagaacgcgaactgcgtcgtatggaccgcaaagttgagggtgtggcattcgacacacgggtacttccggataaaaagacagacggcagaaattcagatgaagtcagcgaaattaatattgataagcttttgaatcagtcgaatacaccgttgccggagattaaggaagaaaaacatgtgacactgaccgcggaaggatcagaaccatatgttgcaccttctgcattttcagaggaagcatttgaagcaaaaagtgtgatgacggatacatcccttttccatacagagccggcatatcaggagaatgtttctacagagataacatatcgtgaaaatacggctgctgaaaatgtctttgagcaaaaagcagctgataaaccagaacccgtccgagtgacagaagaaacagtggaacttcgacctgaaaaaacagaccggcctaagaaaaatgcaaaactgacagaggatgagatccaaagtgatgtttcttcgattgaggaagaaattcatttagaagcacagaaggaaagaaagtatgtgttcccgcctgtgtctttattgaaaccgccaagcaataagcagggcgattctaaacagcatcttcaggagacagcccagaaattacagcagacattaaagaattttggcgttaatgtcacaatcacgaatatcagctgcggtccttctgtaacacgctatgagatccagccggaaatgggcgtgaaggtaagcaagatcgtcaatctcgcagatgatatcaaattaaaccttgcagcggcagatatccgaatcgaggcaccaatccctggaaaggctgcggtaggaatcgaagttccgaacaaggagacgttaatggtttcttttcgtgaacttgtggattctccggaatttaaaaaccataagtcaaacatttctttctgcgttggaaaggacattggcggaaatgtaacagttgcagatattgcaaaaatgccgcatttgctgatcgcaggagcgacaggctccggtaaatctgtctgcatcaatacgattatcatgagcattttgtataaagcagatccaaaagatgtaaaattgatcatggtagatccgaaagtagttgaacttagtgtatacaacggaataccacatcttttgatcccggttgtgacagacccgaaaaaggcggcaggcgcacttcactgggcggttggagaaatgacggaccgttatcagaagtttgcggaagcaaatgtgcgtgacctgaagggttacaatgcaaaaatcgacgaactgccggatggcgaagataaaccggaaaaattaccacagatcgtgattatcgtagacgagctggcggatctgatgatggtggctcccggggacgtagaggaatcaatctgccgtctggcacagcttgcaagagcctgtggaatccacctgatcattgcaacgcagcgtccgtcggtcaatgtcataacaggactgatcaaggcgaacatgccaagccggattgcttttgcggtaacatccggaattgattcaagaacgatcctcgatatgaatggagcggaaaagcttcttggaaaaggtgatatgttattcaatccgcagggtgttccaaagccgcttcgtgtgcagggagcttttgtttcggacaaggaagtgtcggatgtggttgcctacataaaagacgaaaacggacaggtaagttacaattcatcggtggaagagcagatgaacagtatcgagtccggtaatacaaccgtaagcattgattccggacagacaggggatggaagagatccttattttgcagatgcagcaaaacttctgattgataaggaaaaaggttccattggaatgctgcagcgctatttcaaagtcggctttaaccgtgcagcgcgtattatggatcagcttgaagaagctggaatcgtaggaccggaggaaggaacaaagccgagaaaagtgttaatgtcttcagaacagtttgaacagtacgaggaagaatatctgtaattaatatttgcttatcaataagacttgtactataataactacttataaactaaaactataaaaatatgcgaaagagaatcgcaggaatggagtttggaatgaaaagtgatattcagattgcacaggaagcagaaatgctcccaattaaggaagtggcagaaaagcttggaattggagaggatgatctggaattatacggaaagtataaggcaaaattatcggatgaactgatcaaccgtgtgaaggacaacccggatggcaagctgatccttgtgactgcgatcaatccaactccggcgggagagggaaaaacaacgacaagcgtcggattaggacaggcattcggacgtctcggcaagaaggcagtgatcgcattgcgtgagccgtccttaggaccatgttttggaattaaaggaggagctgcaggaggcggatatgcacaggtagtgccaatggaggatttaaacctgcattttaccggagattttcatgcaattacttctgctaataacctgttggcagctttattggataaccacatccagcagggaaatgaacttggcattgacacaagacagatcgtatggaaacgctgtcttgacatgaatgaccgtgtacttcgcaatacggtagtcggacttggaagtaaaatggacggtgttgtgagagaggatcactttgtgatcacagttgcatctgagattatggcaattctttgtcttgcaacagatatgcatgacttaaaaagaagattaggacgcattattgttgcctatacttatgaaggaaagcctgtgactgcagatgaccttcaggcaaccggtgcaatggcagctttattaaaggatgctttaaaaccaaacctgatccagacattagagcatacacctgcaattgtacatggcggacctttcgctaacattgcacacggatgtaattctgtccgcgctacaaagacagctttaaaacttgcagactacgttatcactgaggctggtttcggtgcagatcttggcgcagagaagttctttgatatcaaatgcagaaaagcagatttaaaaccggatgcagttgttttagttgcaacaatccgcgctttgaaatataatggtggagttgcgaaggctgatcttgcagaagaaaacttagatgctttgaaaaaaggtatcgtaaatctggaaaaacatatcgaaaatcttcagaaatatggtgttccggttgtcgtaacattgaattcctttgtgacagataccaaggcagaaacagattttgtcgagcagttctgccatgagagagactgcgagtttgcactttccgaggtatgggaaaaaggtggcgagggcggtatcgcactggccaataaagtacttgagacattagagaagaaggaaagccatttcaaagtcttatatgaaaatgaactttcgcttgaagagaaaatcgagacaatcgcaaaagagatttatggtgcagacggagttacttatgctccggcagcaaaaaaagaattaaagagaattacagatatgggactttctaatttccctgtctgcatggctaaaacacagtattctctttccgatgaccagacaaagcttggacgtccggaaggatttacaatcaacgtaagagaagtatatgtttccgcaggtgcaggatttgtcgttgctgtaacaggagcaatcatgacaatgcctggtctgccgaaaaaacctgctgcatatggaattgacgtaaatgatgagggtgttattactggtttattctaaaagcaaattgcagtagaaacagattgagaggaactatggcacagattattgacggaaagaaaatttcacaggacatcaaagatgaattaaaagagaaagtgacagcattaaaggaagcaggtacagaggttgcacttgccgtgatccaggtaggaaatgatcctgcttcttcggtatatgtaagaaacaaaaagagagcctgcgagtatattgggatcagatctttatcttatgaacttccggaggagacaacagaagcagaactgatcgagctgattgaaaaactgaatgaggataagacggtaaatggcattttagtccagcttccggtaccgaaacatattgatccggataagattatccggacgatttccccggaaaaagacgtagacggtttccacccacagaatgttggaaaactggtgatcggggaggaaggttttgtatcctgtactccggctggcgtgatcgaacttttgaaacgttctggaattgctatttccggaaaaaactgtgtggttgttggaagaagcaacattgttggtaagccaatggcacttttgatgcttcgtgagaatgcgactgtaacgatcgctcattccaaaacggaaaatctgaaagaattatgtaagaccgcagacattctgattgttgcgattggaaagccacagtttatcacagcagattatgtgaaagagggagctgttgtaatcgacgtcggaatccacagagacgagaataataagctttgtggcgatgtgcgttatgatgaggtcgcagaaaaagcatctgcgatcacacctgttccgggtggagtcggaccaatgacaattgcgatgctgatgcgcaactgcgtggagagtcttgacagacaataagattggtagagatagaaagggtttcatatgaaatgtgcaaagtgtggagctgagttaaaagaaggctgtttatattgttccgtatgcggccatgaagcacaaatggtaaatggttattcagttttggaagaagattatctgaaggctcttttaacagatgaggcggcaaaagatacatctgcggaagaaacaggaaaccagaaaagaaaagcagaggaactccgaaaaaagaaaaaacagactccgtggatcatcataggaagtattgcggctttggcaatcgttattgccattggtgcaattgcttatgtgcgttatcagaacagcaattcctatgattatcagatcgaaatggcagagaaggaactggtggatttaaattatgagaaagcgctttcttattataaaaatgcactgaccttatcaccgaatgatatcaatgcaagagctgccatggctgaaatctatctggcaagaaaagaatatgattctgcattggtgcttgaaatggagatcatcacgctcgataagaagaataaagaggcttatcaggggcttatcacgatctatgaggcaaaaggggaatacgataaaatctcagaacttgcatctactgtgacagatacagacctgctcgaattattttccggttacatcgttgcaaaaccggtattctatccggatgagggaacttatgatgtctatacagaggtgactattttttcaattgaggaatgcgatatttattatacgttagacgaatcggacccgacaaagaatggtattttgtatacggatgcgggaatagaactcgatgatgttggaaagtatacgatcaaagctgtctgcaaaaatgacaagggtatctacagtgatattgtaacctgcaaatacaagacagaagctaaggcaccggattatccagaagtgacgccggatggtggtacaatggatgatattacatttgtagtgatcgcggcggatgaaggatgcagtatttattacacatgggatggaacagatccgacggatacatccgaacgttatacagagccgatcgaagtaccggaaggaaataatatactgtctatcattgtgatcaatgacaagacaaaacttaccagtgaaatctatcgaacgaactttatctatcagccaaaacagggaacggtggatatagagtaatcagagttttaaagcatgtttgtaaagaaaaggtgtaagtaatctttaatttttacagcctgaaagaaaaagaaacccggtgggaatcctatggattctaccgggtttcttatgtgcttaaaacgattcctttaattttcttccgggataaattcaatcacatcttttgcaagtttggaaacgcgggcaagagagtaaacctcaacaccctgtgaaatcaatttttcacgtcccggctggaatgatttctcaatcaggataccaacacctgcaatggaagcacctgcttctgtcaataaacggatcgcaccgcttgcagcttctccgtttgcaagaaaatcatcaatgatcagaacgttgtcattatcttcaatgaactgatgggataatgtcaattcgtagcttgttcccttagtaaaggaagttacaaccgtctgaagaagattatcattcaaaaccttggaaggctgtttctttaaaatgatcattggaacttttaatgcgctggcagttgtaagtgccggagcaataccggagctttcaatggtaacaacctttgtgattcctctatttgcaaaatgtctggcaaaatcatcgccaatctgctgcattaaaaccggatcaacctgatgattgataaagctgtctactttgagaatattttcagataaggcatgaccttcttttaagattttttcttcaagttctttcactatgtcacctcgtaaatatgtattcgtaatatttttaagaacaaaaggtgcatgaaaagcattttctctttgttctttattttgcataattgtagcacaattatagtatgaaaaaaagactatttcgtattttcttttgaattaaaaaatattttattcaaacagctcgccataaagttcttccaccagatgatctaagaatgtttcctctaaatccgggtattgttttgagagaaaacgtgtcataatttcatagcgcttaaagtaaagatcctgtcccgaaatttcctcaccaaaactttcgtcaatatcatttgcagtgtaagtatccgtaaaccatgaaataatttcggattccaaattattttctttttgtgcctgggtatcaagcgttttcaactggcgtaatgaaacaatgccgatcacgaagaaaataaggagcataactcccataactacgcagagcatgatcttcatataatcagcaacatggatgggaagaacgccagtggcaaataagatcagtgcgataaaccctaaaatacttaccagcagaaaagagtacgcagttgattttgtctcctctttttttgattcttttgaaacataaactttcataattattctcactttcttttttataatcgcttgtaactattcagtacacaattcgcaaaaccgcatcttcgatgctttccttttgctcattgtggttacttcgccaaagaaattttcaaaattgtgctcattcatgcaagcatgattcgcaaatttatgaaaattgccttggctctgaatagttacaattatatttgatttactagactggggcaacggttttatgatataatttttttgtatgaaaataacaattttatgtgtgggaaaaattaaagaaaaattttacagggatgcgatcgcagagtacgaaaagcgcttaagccgctattgcaaatttgaagtgatcgaggtggcagacgagaaaacaccggatcacgcaagcgagaatatggagcttctcatcaaggagaaagaagcagagcgtatggaaaagtacttaaaagaggggatctatgtgattgcacttgcaattgaagggaaacagttagattccgtagagttatccgaaaagatcgattcgttgggaacgtccggtacaagccatatcatttttgtgatcggcggatcgctcggattatcagaacgcgttttaaagcgtgcagactataaactcagtttctctaaaatgacatttccgcatcagttgatgcgtgtgatcttatcggagcagatttaccgcagttaccgtattatgaaccatgaaccgtatcataaataaaatgtatcgattcagagccaaaggaaagctctgaaagaacggttttgcgaatgggtgctgaattacaataaaacaaatatcataaatcggaggaatttataacatatgatgagaataaaggagtaccgtaaggcagaaagcttagaggaagcctatgaactcaaccagaaaaaatccaaccgtatcatagccggaggactctggatgaaaatgggagaccgcaatctgatgacagcgattgatctaagtggtctgggcttagatcagattgaggaaacagagaatgaatttgtcatcggctgcatggcaacgctcagagatttagaagtgcaccctggacttaatgcatacacgaaaggcgccgcaaaggaaagtgtctgtcatattgtgggagtgcagtttcgcaattgtgcgactgtcggcggaagcatttacggaagatttggcttttctgacgtattgactttatttgcagcattagactgttatgtggaattatatcatggaggaaatgtaccgatcagagattttatccatatggattatgacaatgatattcttgttgcggtacatatcaaaaaaacacctttgaaggttacttatctttcacagagaaacacagcgacagattttcctgtccttgcggtggctgtttcagagtatgaggataaactgcatgtcagcattggcgcacgaccggtcaaagcggatgtattgacagtggatctttctgaaaaagcagacatggatcagcttgtgaaaaaagtaacggaatcatttccgtttggaagcaaccggcgtgcaggggcagattacagacgtcacttgtcaggagttctctttaagagagcctgcaccgcaaataatgacaactaaccgaatgcagcacgcagatacagaataaaatattgctctggtgatgcaatcgttatagataaatggaggatagaaaatgaggatacatttatggctgaatggcaaagaaatttcagatgagatttcgccggatatgccgttattagaatatgtgagaagtaagggctgttacagtgtgaaacgtggctgtgagacatccaactgtggactttgtacggtatggatgaataaaaagccggtgctttcctgttccgtgcttgcggcaagagcagacggaaaagaaatcgtgacattagaaggagtgcaggaacgtgcggctgaatttggaacctatcttgcaaatcagggtggcgagcagtgtggtttctgtaatccgggatttatcatgaatgtgctggcaatggaagatgaattaattgatccgaccgagaaagagatcaaggaatatctttccggaaatctctgccgctgcagtggttatgagagccagctgcgtgcgataaagaattatctgaaccgctcaaaagaacagaaataaacagttttgtcaagtttacagttatgtaacaataagaaacgaggaaagacaatatgaaatatgtaaatgctcccgtggtaaaaaaagatgcgatggctcttgtgacgggaaaaccagtttatatggatgatgtggcaccaaaggactgtctgatcgtaaaagtgctgagaagtccttatgcgcatgccctgattgaagagatccagactgcaaatgctttaaaacaaaaaggaatcgagtgtattctgacctataaagatgttccgcaccgccgttttaccatggctggtcagaccttcccggaaccaagtccttatgaccgttacattttagacgagcgtgtccgttttgtcggggatgcggtcgcaatcgtggcaggggaagatgaggcggcagttgaccgcgccttaaagcttatcaaagtaaaatacaaagtgttagagcctgtgttagactatcatactgcaaaggataatccagttctcgttcatccggaagatgactggaagtcactctgtccggttggggcagacaataaaaggaatctctgcgcatccggtatggatggtgacggggatgtggatgcagtgatgaacgactgtgatattgttatggaaggaacttatcatgtaaaagccatgcagcaaagcatgatggaaactttccggacagctacttatctggatacttatggcagactgaatattttatcatcgacacagatcccattccatgtgagaagaatcttagcgaatgcgttagatattccaaaatcgagagtgcgcgtgataaaaccaaggattggtggaggctttggggcaaaacagaccgtggtagcagaggtatatcctgcaattgtcaccatgaaaaccggaaagcctgccaaaatgatttttacaagaaaagaatctctgatcgcatcctctccaagacatgaaatggaagtgactgtgaaaatgggtgcgatgaaggacggtacaatccgggcactggatctgtatacgctttcgaataccggggcttttggcgagcatggaccgacaaccgttggattgagcggtcataaatccattccaatgtatcagaccgaagcattccgctttcagtatgatgttgtatacacgaatcatatgtcggcaggtgcttatcgtggttatggcgctacacaggggatttttgcagtggagtcaatggtaaaccgcctcgcggacaaactgggcatggacccattggagatccggtataagaatatgacgcacgaaggggatgtcatgccagcttattatggagagacggcaaacagttgtaagctggaggattgtctgaaaaaggcggcagatatgatcggatgggacaaaaaaccattacgtcaggtgatgccggacggaaagatccgcggacttggaaccgcaatggcaatgcagggttccgcaatttcaaactgtgatgtaggttctgtcacgatcaaactgagtgatgagggattttacaatgtgatcgtcggctgtacggatatgggaaccggctgcgatacgatcattgcacagtttgtggcagacagtctcgatacagatattgacaatatcgctgtgtttggcgtagatacagatacatcaccttatgattccggttcgtatgcttcgagtacaacgtatctgaccggaatggcggcagtgaatgcggcgggtcttatgcgtgaaaagattttacagcttggtgctaagatcttgcaggaagacattacgaagctggaatttgacggaaaacgcgtatttaatgttgaaaatggaaaagaagtgtctctgtttgatctggcaactgcatccatggtcaataatgagattgcgttagaagttacctacagccacagttccccggtttcaccgccaccgtttatggctgcgtgtgcagaggttgagattgatccggagaccggagcgattgaactgttggattatacagcatgcgtggactgcggaacggttgtgaataccaatcttgcaagagtacagaccgaaggcggtctgctgcagggaatcggaatggcactttacgaggatgtctggtacaacgaaaaaggagtaaacctttcgaactcgctcatgcagtataagattcctacacgtcttgattttgataagatccgtgtggaatttgaaagcagttatgagccgaccggaccgtttggtgcaaagtcgatcggtgagatcgtgatcaatacaccggctccggcgattgtggatgctgtatacaatgcaacaggtgtgtgggtgaatgaactgccgattaccccggagaagattttaaaaggaatgcatgtgatttgagatggaatctgattctgttagcggccggatattccagacgttttggcggaagaaagctgttagcagagataaatggagtaccgctttaccgttattctttagaaaaaatgaaaaagctttcccgaaacttagacagtgcacatattctgattgtgacgtcttaccctgaaattgaagatttttgcaggaaatccggatttacagttttaaaaaatgagggtggggaaaataccggaattgcatcttctatccataaagcagtggaatatttagaaagaacggaccgcgttttggaaagccgggaaagttttgatgtgttttttacggctgaccagcccggactagatgagacggaggcagaactttttttgcggcagtatgcgctgcagaagaaaaaaatcggcacaatggagtgtgaggctgtgtggcgcagtccgaatgtgtttgatgcatgctatcgtaaagaattattgcagctttccggtgaaaaaggcggaaaaattgtcatgcggcagcataaagaggatgtgtttgcttatcatacggacagggtggaacagtttttggatattgatacaagagaggatcttttgcgcatatcagataagcttttttcataagtttatatatgagtaaaaacagtaaaaatccaatccatgaaaaaatgataagtcagttagaactccccaaagatcttatgcttggggcagcaatcgtcacgatcaccgggagaagagaggttctgatcgagaattacaggggaatcatcgaactggaggattcgcttgtgaaagttcagacaaagaactgcagactgcagattctcggcacgcatctgacggtggagtattatacgaatgaggaaatgaaaatcgtcggactgatcgattccgtttcctacgagtattaatgtttgtcttatcgtggattaagttttttcgtggatatgtgtatgtgcacctgactggatatgcaacggaacgttttcttaatttatgtggcaatcgtaacattctaatctggaatctaaaacctgcggaggacggatactatttttatatcagtgttgccggatatcgcagcttaaagccaatcttaaaaaagacgaagacaaaggcacgtattttaaagaaatatggtgtgccgtttcagatgttccgctatcggaaacataaagtatttgcggtggggattttagtttctgccgtactgctgttttactgttccggatttgtctggaatattgaggtaaagggcaattcttatctctcggaggaaacaatccttgcttttttacagagggaaaatgcgggattcggtgtgccgaaaagaagcattaactgtgaggaactcgaagaaaagctgcgctctgcctacagtgaggttatctggacttcggtgaaggtatatggcacaaaaatgaccgtcgaacttcaggagaacctgctgccggaggaagaatacgcggcgaaggatgatacgcccaacgacattgtcgcaaaaaaagacggcgtgatcgcatccatgataacgagaaccggaacaccacttgtgacagcagacatggaagtgaaaaagggagatatccttgtcagcggcagggcagagattataaatgacgacggagaagtggcagaatatatttatccgggtgcagatgcggatatcattgcagaggtaaatttttactacgaagatgaaataaatatctcgtatcaggataaaataaaaacaggcaggcaaaaaaaggattatggaatccgtttttttgattatcacttgaaaaatccgttttttcatccgaagtttgcacagtatgagctgacggaacaggcagaccagttacactttacggacaatttttatctgcctgtttactttgagacgtatttgtatgaagaatacgagacagagcaaaaggcatacagtaaaaaagaggcagaaacaattgcagaaaaacgttttgcacaatatcttgcaaatttagaggaaaaaggtattcaaattctggaaaaaaatgttatgatagaaaaagtgaatcagaaatatgtggtaacaggaacggtggacgcttacgaatccattgtttcatatcagccgacagagattctggaaataacgagtgaagaggggcagcaaccgaatgagtctgactgaaatatctttgaatataccaacggaacatgtggcaaatgtcttcggacagtttgacgcctatataaagaaaattgagcgcactcttaatgtgacggtagtcgttcgtggagattccatgaaactgattggaaatgagcgtcagattaagagtgcttctaatgtgtttatgcagcttttggaactatccaaaagaggcaacgtcattacggagcagaatgtgaaatatgccctgtcgttagcagcagaggaaaaagaagcagcaatcgttgagattgacaaggactgcatctgccatacgatcaacggaaaaccagtgaagccgaaaacgttaggacagaagaattatgtcgatgcaatccggcagaagatgatcgtttttggcatgggacctgccggaaccggtaagacttatcttgcaatggcaatggcgatcaccgcatttaaaaatgaagaagtcggaagaattattctgacaagaccggcgattgaggctggagagaagcttggatttctcccgggagatctgcaaagcaaggtagatccttatttgcggcctttatacgatgcgctttatcagatcatgggagccgaaagcttccagaagaatatggaaaaggggctgatcgaggttgcaccgcttgcctacatgagaggacgtacattagacaatgcgtttattattcttgatgaggcacagaatacgacacctgcgcagatgaagatgtttctgacgcgaatcggattcggctcaaaagcggtcattaccggtgatgcgacacagaaagacctttcaccgggaacggcttccggtttagatgttgcattgaaagtgttgaaaaaagtggacgagatcggtatctgtgaactgaccagtcaggatgttgtgcgtcatccggtcgtacagaagatcgtcaaagcatatgaagattttgaaaaccggaataagaagaaaagtacggaacagaaaagaaaatgggagaaacgatagatgaaggaacagtttgtggcaaaaagaatcataaatataggattgatttttcttgctgcgatcgtattttctgttgttgcaggcattacaggcggactgtatcttgacattcttctgggaatcggtgcattgacaatcctttttgctgcattattggtctttttgcttatttatgagagaaaccgtaacaggatagcgcataaccgggagactgattatggaaagattgcaaaaggatttctgctttctgctgtggcggcgactgctttcccttttttgccggagtttgcaagtcctgtgatgatactgccggttatcatgtcggcggctggaacctatgagctttccgtgtgcagttcctttttcttctgtgtgatattagagattgcaaagggaagttcttcttatgaagtcctctgtgatacaatgctgcttctgtttggatttgtgattgtacatctgttagaagatgcgaaaaataaagtgtggtatcttatattgacatttgcggtggcgtttgtggttccggtgctgttttcgtatttcttttatcaggaaccacattatgatgttatggtgaaagctgccatagcggcggctctgaccgatttgtctgcagcagttgtgtatccgcttctggcaagacagaaggaacacgagattgacaattttttaacagatataacggaagaagattatatgctattgcgggaacttaaaaatttttccagacaggagtaccggcatgcgctccgtgtctcaagagtttgtgaaaaatgtgcaaagttagtgggggcagatgttgcggtcagcaaggcggcaggactttactaccgtatcggcattttagacggtgatccaatggtggaaaacggcgtcatgcgggcacagacaaactgtttcccggagcgggtgacagagattttgtccgaatattatggaatggaaaaaatgccttcatccatagaatctgccattgtacaaatggtagacggattgatcaagaagttagaggcactcgataagacgagtaaaatcgagggcggctggaataaagaaatggtcatttaccagacactgaatgacttttcggcacagggactatacgatcagtccggacttagtatgaatatgtttttaaaaatcagagaatatcttgtaaaagaggaggctttgctgttatgacattgaattttgaagcggaagtaacgataccatttgattttgatgcggaaacgctggctggggaagtgatcgcttttacattagatcatgaggattttccatatgagccggaggtaaatctgaccttagtagacaatgagggaatccatgcgatcaataaggagttccgggagattgaccgccctacggatgttttatcttttccaatgctttcctatgagagtgcaggagatttttcaaaattagaagatgattatgatgataacttcaatccggataccggagagattatgttaggggatattgtgatctccgtggacaaggttttagagcaggcggaaagttacggacataccacaaagcgtgagtatgcatttctgatcgtacatagcatgctgcacctgtttggctatgatcatatgacaccggaggaagctgcggtgatggaagcaaaacaaaaacagattcttgatgagatgaatatcacaagataaagaaattttgaggaataatatgagtaataaaaagagcagcaccagttttctggtgcagggatccattcttgcaatggcatcgatcatcagtcgtatcatcgggttagtatatcgtatcccgctgactgctattatcggaaataaaggaaatgactattacggatgtgcgtttgagatttataatatattgctgatcatttcatcctacagtctgccactggcggtttcaaagcttgtgtctgcggacatgtctcttggaagaaagaaaaatgtataccgtattttaaaatgtgcgctgacctttggtctggtatcaggtacgatcgctgcgctgatcctgttctttggagcagaatttatcaccggaacgatcatgaaaacaccatacagtattttcgcagtaaaagtactcgttccaacactgatcgttgttgcggtattaggtgttttgcgtggatttttccagggacttggaacgatgatgccaagtgctgtgtcacagattttagagcagatcgcaaatgcaatcgtcagtgtctgggctgcctatgtgctttataattatggaacgaaagtaggtgcagtactcggaaatacggaaaattatgcggctgcctacggtgctgccggaggaacgttaggtacgggaaccggggcagtgataggactattatttgcaacgtttgtgctgatcgcatatttaagtgtgttcaaacgccagatgaagcgggagcgccgcgcgaaagtagacagttattcttatatttttaagattttatttattacgatcattcctgttctgatgagtacaacaatctacaattgtaatgcgattttagatcaggcaatttttaaaaacattgcaaatttacagggatattctgcaaacgacatcagtgagtggaacggtatttacacaggaaaatacaagacactgatcaatgtaccgatttccattgcctctgcattggctgcatcttctgttccggcgttgacggcagcttacacaaatggaaagaaggatgctgtgcgtgcgcagatcaatacagcaatccgttttattatggtagtggcatttccgtgtgcagtgggaatgggtgttttggcatccccaatcttacagcttttattccgcgattcctcggaacttgcagcgagcatgttgcaattgggagcagtttccattgtatttttctcactgtcgacgctgtcaaacggccttttgcagggaatcaaccgcatgagggagcctgtaaagaatgcgctgatcgctctggtgttacacatctgtttattagtagtactgatgtatgcctttaaactgaatatctatgcggtcgtttatgccaatgcatttttcggactgttaatgtgtctgttaaatgcccattccgtcagaaaatacagcggatatcagcaggagatcaaacgaacttttgtcattccggggatttctgcactgatcatgggtgtggcagtttatttgtcctatcagttgtttttgtatattctgcgtgtcaatgcgatcgcaacagtgttcagcattctgatcggcgtgatcgtgtatgccgtggttcttttattgttaaagggattgacagaggaagaaattctgaaattcccgaagggagctgcactggtgagacttgccagaaaactgcatctgctgcgctaggtggatgacctggcttaaaacttatgaagaagcttgcggccggcttgggaatgcaattaaaaattgaatttgttccgttacaaacacaattgcagaaataaataattttaaagtgcaataaaacagacatgttgtataaaacataacagaaagaccaatactctatcatgggtgatgaatttgaaaaaaatgataggtatttgtctttcttttgttttggtgcttgcaggagcgctctggattgaccggatcaatgagaatatcgtctctgatccgcctgtaactgaggaaaagctgacggatacagaagaaatggcagaaagtatgtcgtatctttctaatccgaaatattatttgtttgaatttgacggcagagtagctgttttcgaaaaagataaagagacgatgtatatggaaacagcaattcctgttgagatgcttccggaaagcctgcgttctgatttaaaagatggcattgccattgatacagaacaggaattatacgagtttcttgaaaattattcttcttagaatcatttgaatgttgctattacttatggtaagataggtatggtttttagataacgagaaacaatgtgaggaatcatgaatataaaggaaaagaaaagctttgatgttcttgtgatcggtggcggcgctgccggaatgatggctgcaatcactgctgcttcgaatggagccgataccgtgatactagagcacaaagaccgggtgggaaagaaaattttatctaccggaaatggaaaatgcaattatacgaacgaaaagcagggtgtttcttattacagaggagacaaccctgcctttgtggtgcctgtgatggaacagtttggatttgcgcagaccgttgatttttttcagcggcttggaatctatccgaaaaataagaatggttattattatccggcaagtgaacaggctgcatccgttttagatgtccttcgcatggaactttcttatcgcagggtatctgttgtgacagaatgtgaagtaacgaccatagaagaaaagaaaaacggatttgttctagagacgggcaagggtagattttttgcaaaaaaaatcatatttgcaacaggacttttagcagcaccaaagaccggaagtgacggaagtgccattccgctgatcaaagcattcggacatcgcttttcggatgtcgttccggcacttgtggcattgcagtgtaaggaaaattattttaaacaattagctggaatccgcacagaggcatcagtcacacttgacattgacggcaggaaaacggtctcagaccgtggcgaacttcaattgaccgactatggaatctccggaattccggtatttcaggtcagccgatttgccacgaaggcattgaagaaaaagcagaagatcacagcaacaattgatttccttccttccctgagcgggcaggaagcggcacagttgttaacagaacgttttcatgaaaatgcgcatggaaagtcagccggtgaagcaatgatcggcttgttaaatcataagttaagtaatgtgttgttaaaagaatccggaatacaacctgataaaagtgcagatgagatagcgcaggagaaactggcacgcttcgtaaaacagtgcaaacaatttatggtttctgtcatcggaagcaagtcttttgaacaggcacaggtctgtgccggcggcgtacataccggagaaatcaatcctgaaacaatggaatcagcaattgtcccaaatatttactttgcgggagaagtggttgacattgacggcatgtgtggcggttataatttgcagtgggcgtggtcgagcggttatgtagccggaaaacacgcagcactttcctgtgagaacagaacatattaacagacacccgactttttgtcagataaatacatatagaacaggaaaataaaatgatcagaatcagtcagatcaaactgccagtggaacataacgaagcgcagttatatcagaaagttgaaaaaagtttaaaaataaaaaaggagcagatcaacaaactagagatcgtcaaaaagtccattgatgcgcgcaagaagccagatttgtcaattgtctactctgtggacgtatgggttgacaatgaggaaaaggtttttaaacgctccggaaataaaaatgctgtctgtgtgaaggagaagcattatcatacgcctgtgcatggaacaaacctattaaaccaccgtccggtcatcatcggggcaggtccggcaggtttattctgcgcctatctgcttgcgaaggaaggctaccgcccgctggtgtttgagcgcggcaaaaaggtggaggagagaaccggtgatgttttggagttctggaaaacgggcatgttaaacccggcatccaatgtacagttcggcgagggcggcgcaggaacgttttcagacggaaaattaaatacactggtaaaagacccgatcggacgcaaccggtttgtcttagatacctttgtgacgtttggcgcgccgggtaaaattacatatgagaacaagccgcatatcggaaccgatattttatcaaaagtcattgcaaccatgcgcgaggagatcatacgtcttggaggaacgtttgcatttgaaagctgtgtgacggatatccgtgtggaacaggggaagataacggctgttttgatcaatgatgagacatggattgagacggacatctgtgtgctcgcattaggtcacagtgccagagatacctttgaaatgctgcataaaacagagctttttatggagccaaaggcgtttgcagtgggttttcgtgtggaacatccgcaaaaggatattaaccgcagccagtatggagaaaaatatggtgaaatgcttgaagcggcgccttataaagtgacagcaaatcttgcaaatggcaggggagtgtattcgttttgcatgtgtccgggcggttacgtggtgaatgcatcttcggaggaaaaacgtctcgcggtaaatggcatgagttattcggaccgtggaagcagcaatgcaaacagtgcgatcattgtatctgtgacaccggatgatttcgagggaacagacgcactttccggtgtacattttcagagaaaactggaagaaaaagcatatgcactcggcaatggaaaaatcccacaacagctttttggtgattattgtgaaaataaaaaaagttcatcctatggatcgttttcttcagagacaaggggagagacggcttttgccaatttaaggggaatgtttacagatgagatcgaacagtcctttatcgaagggatgcacgattttgcgagacatattccggagtttgaccgtaaggatgcaatcctgtccggtgtggagagccggacatcttccccggtaagaatccgcagggatgaagcgtttgaggcaaatatcaaaggcatttacccttgtggggaaggcgccggatatgcaggaggaatcacttcggctgccatggacggcatgaaagttgcggaggcaatcatccgcacttatcagtcgttttaagagcagctttacagataaatggaaggaagtaacataagtggcagaatttacaccaatgatgcagcattatctgcagacaaaagaagaatataaagactgtattttattttaccgtctcggcgatttttatgaaatgttttttgatgatgcggtgttagtgtcaaaagagttagaactgacactgaccggaaaaagctgcggtatggaggaacgcgcaccgatgtgcggtattccgtatcatgcagtggaagggtatttaaaccgtctggtagccaatggtcataaagtggcgatctgtgagcaggtggaagatccaaagcttgcaaaaggaattgtaaaaagagaagtcatccgtgttgtcacaccgggaacaaacatggatattcaggcgcttgatgagtccaaaaacaattacatcatgtgtattgtctatctggcagataaatatggaatttcgctcgcggatgtatcgaccggagattattatgtgacagaagtggattcggagcggaaactgatcgatgagatcaacaaatttgcaccttccgagatcgtatgtaatgaaagtttttatatgagcggcgttgatcttgatgatatgcgtcaccgcctcggcattacgatttactctctggatgcatggtatttcagcgacgagacggcagagacgacgttaaaggggcattttcatgtcaacagtctggaaggacttgggttaaatgactatgcttacggaacaattgcggcgggagcactgttaaagtatctgtatgagacacagaaaaataatctggatcatatttctgcgattcatccgtattccaccggaaaattcatgatcattgacagttccacaagaagaaacttagagttagttgagacgatgcgtgaaaagcaaaaaagaggttccctgctctgggtgttagataaaacgaaaacagccatgggtgcaagacttttacgttcttatgtggaacagccgctgattgataagacggaaattgaaaaaagacaggatgcaatcgcggacattaacaaacacatgatcacaagagaagaactcagagagtatttaaacccgatttatgatctggagcggcttatcacccgtgtgacctatctctctgcgaatccaagagatctgatcgcatttaaaaattccattggcatgctgccgccggtcaaatcattactggatgattttgactcggaacttttaaaagaaatccaggcggatatggatgcgcttgaagagctttaccagttgatcaacgagtctattatagaggaaccgccgatctctgtacgtgagggcggtctgatcaaagacggttacaacgaaaatgttgacacgtaccgtcatgccaaaacagagggaaaaacatggctcgctgagttagaagcaaaagagcgcgagaagacaggcattaaaaacctgaaaattaaattcaacaaggtgtttggctattatttagaggtgactaattcttacaaagaccttgttccggattattttacaagaaaacagacacttgccaacgctgagcgttacatcacaccggaattaaaggaactcgaagatatgatcttgggcgcagaggacaagctgatcaatttagagtatgatctgttctgtgaggtgcgtaataaaattgcagcggaagtggtgcgtatccagaaaacagcaaaagcagttgccaagctggatacttttgtgtcacttgcggttgtggcagaccagaacaattactgtcgcccgaaaattaacgaaaacggtgtgatcgacattaaagacggcagacatccggttgtcgaaaaaatgatgaacaatgatatgtttatcgcaaatgacacttatctggataatggaaacaaccgtatttccattatcacaggaccaaacatggcgggaaagtctacctacatgcgacagacggcgatcattgtcttaatggcgcagattggaagctttgttccggcgtcctcggcgaaaatcggaatcgttgaccgtatttttacaagggtaggtgcgtcggatgatcttgccagcggacagagtacgtttatggtggaaatgaatgaggttgccaatatccttcgcaatgctacgagcaattcccttcttgtgttagatgagatcggacgcggtaccagcacatttgacggtcttagtatcgcctgggcggtggtggagcatatcagcaatccaaagctgcttggggcaaaaacactgttcgcaacccattatcacgagctgaccgagttagagggaaagcttcataatgtaaacaactattgtattgcggtaaaggaaaaaggagacgatatcgtattcttacgaaaaattgtccgcggaggcgctgacaagagttatggtattcaggttgcaaaacttgcaggcgtgccggattctgtcattgagcgtgcaaaacagattgtggaagaattaagtgccaacgatattacagcggtcacgaagaatctttccgttgagaccggaacaaaaaagaaaaaagaaaaacttgatgaagtcgatcttgcgcagatgtccttatttgacacagtaaaagatgatgatatcattgaagaattaaaaaatgtcgatcttggcaatatgacaccgatcgacgctttgaataaattgtatgaattacagaataaaatcaaaaaccgctggtaaggttcattttttagaattataaaaggaagaatccttacggtttttgatttgaatggaaaggaagtgcttcagaatgccggaaatcatgttactgaatcaggagaccatagataaaattgccgcaggagaagtggtagaacgcccttcctctgttgtgaaagagcttgtggaaaatgcgattgatgcaaaggcaaccgcagtcacggtggagatcaaagagggcggcatttcctttatccggatcacagacaatggctgtggcattgaaaaaaagcaggttccaatcgcttttttacgacattcaaccagcaaaatccgcagtgtggaagatctgctcagtattcattcccttggtttccgtggcgaggctttgtcaagtattgcagcggtttcacaggtggaactgatcacaaagacttatgatgaactgaccggaacgagatatgtgattgaaggctccaaagaggtggaaaatgaggaaattggagcaccggaaggaactacatttatcgtaagaaaccttttttacaatgttcctgccagaagaaaatttttaaaaacagcgcagactgaggcgggctatatcagtgatctaatggaacgcatggcattatcccacccggatgtctcctttaagtttattaataatgggcagacaaagcttcatacatccggtaacggaaatgagaaagacctgatttatcatatctatggacgtgacattacatcagcggtgcttaaagtggaacatgagacggaattattcaagctccggggctttatcggaaaaccgatcatttccagaggaaaccgcaattatgaaaattattttatcaacggacgttatatcaaaagtgctctgattgctaaatccattgaggaagcctataaaggttttatgatgcagcaccagtatccgttctgtgtgctttattttgaaatgaactcggatcttttggatgtgaacgtacatccaacgaaaatggaactgcgtttcagccagaatgaggagatttaccgctctttatttgagattatccggaatacaatctctcatcgggattttatcccggaagttccggtgcaggaggagaaaaaagagactatccctccggtttcaaagcatacgccggaaccatttgagatcaaacgccggaatcaggaagccttctttgaaaaaatgaagcagacgaacgcaagtccgctgacagtgcaggaggagaacctgttcgcaaaacctgtgactgaaactgatacagaaaaagttacagacaatttaacggaaagtgctgcgaagaacacaaccgtttttaataaaagtgcatctgaaatgaaaaatatctctgatgtgaatgcggattcagatagaaagattgtatctgatatggggattattttagatacgaaggaagtttcgcatgcagaatcctccgacgcagcaattgtctatgaacagcagaatttagagcagcttgattcccacttccttacgaaggatgcaaggaaaaaacataaaatcatcggacaattatttgatacttactggctgatcgaatacgaggataagttattcattatcgaccagcacgccgcacatgagaaagtgttatatgagcgcaccatgaaaaagatttccgataaaaatttttcttcccagacgatcagtccacctatcatcctgacattaagcaatgatgaagtgcaggcattagagacttacgcagagcagctttccacattcggatatgaaattgagccttttggcggaaaagaatatgcaattacagcaattccggcagattttacagatattgacatgaaaacaatgtttattgaaatgctcgatgattttgccaatatttcagggaaagatgcaccgaatctgatcatggaaaaagcagcgtccatgtcctgcaaggcggcagtcaaaggaaacaatcatctttccagaccggagattgaggcgttgatcgatgaactcttagagctggataatccttacaactgcccgcatggaagaccaacgatcatttccatgacaaaatatgaaatcgaaaagaaattcaggagaatcgtataaaaactatgacagagaaacgaccgatggtcatattgaccggaccgacagcagttggaaaaacagccttatcgattgatctggcaaaaaaaatcaatggttccattatctccgcagattccatgcaggtataccgccatatggatatcggttctgcaaaagtaatgccggaggaaatggacggtgtcagacattatctgatcgatgaatttgatccggatgaagaatttcatgttgtaaaatttgtggagcgtgccaaagagcatttagaagaaatctacgcggaaggaaaaatcccgatcattgccgggggcaccggcttttacattcaggcgcttctttataatattgattttaccgagcaggagtgtgacgaggcataccgcaccggcttagagcagcttgccacggaaaaaggtgccggatatttacacgatatgttacgagaagtcgatccggcttctgctgatgccattcacgcaaacaatattaaacgtgtgatccgtgcactcgaattttatcatctgtccgggaagcgcatttcagaacataacgaaaaagaacgggagaaaaactctccttataactttgcatactttgtcctgaccgatgacagggcacatctgtaccagaacattgacaaaagggtagatcttatgatagaacagggacttgtgggtgaagtacagaaattaaaagacatgggctttcaccgtgatatggtttccatgcaggggcttggttacaaagaaatcttagattatctggacggaaaaacaaccttagaggaagccgtttacatcatcaaacgtgaaaccagacattttgccaaacgccagcttacctggttccgccgggaacgcgacgtgatctggcttgataaacagacctacaactatcaagatgaaaaaattctaaacgatatgatagatatattaaaagaaaaaactatcataacctaaattgaaaaagataattgcgaaactcacaaaaatgtaaattgaattatgaagaattgacaaaagattgagaagacactggggagccgccggtccttagaagtcagattctgtatttcattctgatttatcagaaatgaaatgcaggatatgagttcttagtaccgctgcgagcgacacatagcgagagcgtgtcttcgaaaattttgttaattcttcataatcttcgtaatttaaagttgagtttcgtaattatctgcaaactgacgaataaagagaggattaacaaacagtcatgaaccagtttttagaggaacaataccagaaactcggaatttcccgggaagtatatgaatttggagaaaaaatcgaggagtctttaaaagagcgtttcgcagagatcgacgcaagagcagagtacaatcagatgaaggttgtaaaagcaatgcaggataaccgcgtcagtgcagaatgttttaatatgagctccggatatggatataatgatttaggaagagataccttggaaaaagtgtatgcctcctgcttcaagggagaagatgcccttgtcagaccacagatcacctgtggaacacatgcactggccttggcgttaatgtcgaatttaagaccgggggatgaacttttgtctccggtaggaaaaccgtatgataccttagaggaagtaatcggaatccggccttccaagggatcgctggcggaatatggcgttacttacagtcaggtcgatttacttccggacggaagctttgattttgacaatatcagaaaggcaatcaatgaacgcacaaaacttgtaacaattcagcgttccaaaggctatgccacaagaccgactttatcagttgcaagaatcggtgaactcatttcgttcatcaagaatatcaagccggatgtgatctgtatggttgacaactgctatggtgaatttgtcgaggaaaaagagcctttggaagtcggggcagatatgattgttggctctctgatcaaaaatccgggcggcggtttggcaccgatcggcggctatatcgtcgggaaaaaagagtgtgtggaaaatgctgcataccgtctgacatccccgggacttggtaaggaagttggtgcctctctcggcgtgatccagtccttctatcagggattttttatggcgccgaccgttgtaagcggcgcgttaaaaggtgctatttttgctgcaaatatatatgaaaaattaggattttccgtaatcccgaatggaaccgagagcagacatgatatcattcaggcagtgaccttcaacaatccggatgcgatgatcgcattctgcgagggaatccaggcggcagctccggtagacagctatgtgacaccggaaccatgggcgatgccggggtatgacagtgatgtcatcatggctgccggcgcttttgtgcagggttcctccattgagttaagtgcagacggaccgatcaaaccgccatatgcagtttattttcagggcggactgacctggtatcacgcaaaattaggaattttgatgtctttacaaaaacttaaggaacggaatcttgttaatacagacttgttatgctaaaatgaaaaaagagttttttgagttgacataaaagcactttcagggagagtgaaaggaatttatgaatcactcattaccaacaaaagaattaccggaatccgagagaccttatgaaaagttctggaaatatggcgcagccgcattaagtgatgcagaacttttggcaatcgtgatcaagtctggaaacagcagaatgacagccgtggatgtcgccagaagttttctggcacagaaggacagaaatctcatgaatctctacgaactatcgtatgatgagatgaagaagatccgcggaatcggagatgtgatcgccatgcagttaaaatgcattgcagagctttccacgagaatttccaatacaaggcattttgagggaatccagatgaaaagcgcagcgacggttgccgagtattatatggaacaactgcggcatgaacagcaggaaaagctgatcgtctgtatgtttgacagcaaatgcaaatggcttggagatgcggttgttacgacaggaagcgtcagttcttctattgttccgccacgcgagatttttatctgtgctttggagaaaaaggcggtacacatcgtaatggtgcacaatcatccgagcggcagggcagttccttccggggaagatgatgttgtgacagcaaggatagcggaagctggaaagctgttaggtgttgcattgtcggatcatattatcatcggagaccgtacttattttagttaccgggaagccggttatctgacatgatcgtggtgtctgtcacagaaaacagattttcacgggattatctgattatggaaaaacaatacaagggagaagaaaatgaatagcaacgtatacggaattgatcttggaacctgcaatatgaagatttactgcaagacttccaataaaatattaaatgagaagaacaccattgcactggtaaaaaaggatcagatctatgcttatggtgatgcagcttatgcaatgtatgagaaagcaccagagacgatcaatgtcacatttccagtgatcagcggcgtgatcgctgattttaacaatcttcagacaatgcttcagatgtatttagaagaaaatatgaagggaaaaatccgcggtgcagaatttatcgttgctgttccaactgatattacagatgtagaaaaaagagctttttttgaaatgttctataagagcaaattaaaaccaaagagtgtcctgctctgtgaaaaaccaattgcagacgctgtcggtctgggcttagatgtcaatgaaccgacaggtatcatggtcgtagatatcggagcagatacgacagaaatctctgtcatctcccttggcggacttgtgttaagtgatctgttacattttggcggtaaccggattgacgagtccattatcacttatgtgaagcggacttataatcttgtgatcggacagaaaacagcacaggcattaaaagaaaagcttggttccggtattccgggaaatacggatactatggtgatcgtaggacgcgacgtggtgagcggacttccaattgaaatggagatcaacggagaagttgtctatgaggcaatcaaagataacttaaacagcatctgcaactccattaagatgattcttgagaaaactccaccggagcttgcaaaagatattatccattccggtatttatattaccggaggcagttcccagatacataatctgaaccagttattcaaagatatcacaggcattgagatcaacacctgtgaggaaccggaagagtgtgttgtccgtggtctggtgaagattgtaagcgaccagaagtacaaacatctggcattcagcatgaaaaataaaatcttaaaataaacagatgcaacttcacatctgttgaaagaaattgaggaatggaatgagacgaaaatcaaaattttttcttcctgcaagatatctgcttctgattatgtcgggagtctgtattatcatcatgttattaagttttaccttaaatatatccggtggcccgttaaatgcggcagccggttatgtttttgtaccgatgcaggagggaattaataaaatcggcacctggatttccgacaaggcggcaaatctgaaaaacttaagtgatgttatggctgagaatgagcagcttcagagtcaggtagatgaactgactacggaactgaacacaatcaaattagagcagtatgagttagagaatttaagagaactatataatttagaccagaaatatccaagttatgagaaggttgcagccaatgtgatcggaaaaaacagcggaaactggtttaatacgttcacaatcgacaagggaagcaatgaaggcattgaagtggatatgaatgtcatggctggaagcggactggtcggaatcgttaccgatgtcggaccgaattatgcgaaagtaacttccatcatcaatgacacgagtaaggtcagtggaatggtaacaactacatcagataacctgatcgtatccggaagtctgcagaagatgaatgaggatatggtgatcgagttcaataacttgaatgataaagacaacgaggtttctatcaatgatcctgtggtaacttcttccgtatcttacaattaccagcagggaatcctgatcggttatatcagttccattgaaacagattccaataatctgacaaaatccggcacgatcacaccggcagttgattttgagcatattgaagaagtacttgttattttaaataaaaaacagaccattgataattaaggcagggaggacggcatgcggagaaaagtaactgtatttttgatcatagcagtttgttaccttttgcagagcacggtgtttcaggcgctttcgtttgcatcaatcgccccgaatctgatgattgttgttgtgtctgcatttggttttatgagaggaaaaaaagaaggactgtggatcggctttttcacaggacttcttttagatatttttacgggaagtattttaggcttttatgccttactctatatgtatgtgggatattttaacggatttttccggaaaatgttttacccggaagatatcaagctgccgatgttactgatcgcagtcagcgatttttcgtgcagtctgatcatctatttcctgttattcttattccgcggaaagtttgactttttatactatctgctgaatattatgattccggaacttgtttacacaatggttgtgaccatattcctgtatttcattattttaaagatcaaccagaaacttgaagcaatagaaaaaaggagcgctgtaaaatttgtttgagaatatcaaagagttttttcgtacaatctttaaatccagactgcttgtagcggcaacggtaatgacccttttattttcggtgctgctgtttcggatgttccagcttcagatcatacagggagctgaatatcaggataactatacgttgaagattgttcgtgaacgtaccttaaacagtaccagaggaaatattttagaccgaaacggcgaggtgcttgcctataacgaactcgcttattcgatcacgatcgaggataatggttcctatgattcaaccaaggaaaaaaataaacttttaaatgaagagattgcagatatcatcacagctctggaaaaaaacggggatgatattatcaataactttaaagtgactctgaatgacaatggaaattatgaattcagtgtaagtggtacttcgctgaaacgttttcttgcggatgtcttcggacaggcatcttattcagaactgaaatacgacaagaagcttgggtataatcaggcagaggcaactgcagatcaggtcatggattatctgaaaacttccagattcggaatcagtgaagattatgatgaggacatggcttataaaataacggttgtccgttacgcaatgtccgaaaacagttatcagaaatacattgcaactacgatcgcaagcgatgtttccgaggaatctgtggcgtatgtgagcgaaaataccgcaaaactgcagggtgtggaagtgattgatgatacgatccgtaaatacaatgacgcagagtattttgcgtcgatcatcggttacacaggaaaaatttctacggaagaatatgaaagcctgtcagaagataatgacaattacacgttaaatgacgttgtcggaaaagccggtattgagcaggttatggatgcctctctgcagggaacaaaaggctatgaaaagctttatgtcgattatcttggaaaagcggtagaggtgttagagcgtgaggaaccgtctgccggaaatgatgtctatctctccattgataagaacttacagattgcggcttatgatctgttagagcaggagattgcaggtattgtatactcgaatattgaaagctccggttctgagatgaacattccaatcacagatgtttattttgcattggtgaataataatgtgatcgatattgaacattttacggatgaaaaggctgcagataatgaaagagcagtccagcagatttttaatggaagacagcagagtgtattagcatctgttacaaatgagttaaagggagcagcaccgaccgcttttggctcactcgtagaggaagatcaggattattttacttttattatcaatcagttaaaagagaataaaatccttctgcagaaatcaattgataaaacagatgaggtatatcagcagtggcagagtggttctatcagtgcacaggagtatttgaatcatgccattgcaaagaactggatcgacattacacagtttacaattgatgagaagtactcagattcgacagaaatctacgatgcattgtgcgattatattatggatgacattgccacagataccggattttcaaaaatcatttatgagtatctgatcaaagccggatctgtttccggaaaacagttatgtctgatcttatacgatcagggcgtgcttgcgtacgatgcagaggaaatcagctctttggagtcaaatgcagtcagcccggtcagctttttaaaggataagatcaaaaatattgagattacaccggcacagcttgcattagatccttgttccggttcctgtgtgatcacagatgttaagacaggagaattattagcgctggtaagttatccgggatatgataacaaccgtcttgccaatacggtagatgcagattactttgcaagcctgaacacggatctgtcaaaaccgctttataactatgcaacacaggaacgaaccgctcctggatctacttttaaaatggtatcttcagttgcaggtcttgcatccggtgtgatcacaccgaccacacagatcatggataagggtgtgtatgagaacatcagcaaccacccaagatgctgggcattaaatcatggctatacgcatggactgatcaatgtgtcagaggcactgagggattcctgcaactatttcttttatgatgtgggttaccgtcttgcaaccaataattttacgacatcctatgatgatgcaaccggtatttccaagatcacggaatacgcatccctgcttggtctggatgagacgacaggcgtggagattgaggagaatgatccgcagatcgccaatgaatatcctgttatggctgcaatcggacaaagtaataacaactatgcgacgatacagcttggcagatatgtgtctgcgatcgccaatgacggtaatgtgtatgaatacacactgctcagcaaagtctgtgattcggacggtaatactttagagacaattgagccgaaggtaagaaataccgtggatgttttagacaccacacagtggaatgcgattcataccggaatgagaatggtagtagaaaatctttcaacatttgataattttccaatcgaagttgcaggtaagaccggtacggcacagcagagtccaaaccgtccaaaccacgctttatttgttggatatgctccatacaatgatccggaggtttccattgcgacacgtattgcctttggttatacgtcgcacaatgcggctgaatacgcaaaaaatgtgttctcttactattttggtgttcagaacgccgaagacttattaaatggtcaggcagaaaatgtaggtgagtcatcaaacagctttaatgactaaacgataaggaggtcttacttcatgagtgaagtgatcactttcacgtcaggaaaaggcggcgttggcaaaacaactactacagcaaacgtcggagttggactttcactattagagaaaaaggttattttgatcgatacggatattggacttcgcaatctggatgttgtcatggggttagaaaaccggattgtatacaatctggtagatgtgctcacaggacgctgccgggtaaaacaggcagtcatccgcgaccgcagatatccgaatctgtcggttattccttccgcgtgtgtcagggaacatccgcctcttacgacggaagcgatgcaggccctcatggaggaattgaaggaatcctacgattatattttagtagacagcccggctggaattgacagcggatttgatcttgcggtgtgtgcggcagataaagttgttgttgtgacaacaccgcaggttgcggctgtgcatgacgcagattgtgttttgcgtctgcttcggagaagaaaagacatcgaaacgtttttactgatcaattcgttccggaaacaattagtcaaggaaggaaatatgcttcagatttccgatatctgtgaactcttaaataccgacctcttaggagtcgtgttagaggatgaacatattattatctcacagaatcacggcgagactatgtttggaagaaaaagcacttctaagacctgttatgaaaatatctgtaaacggctgacaggggaacagattccgattcctgattttttgcaggaaaagcaccgtttcaggaggattttctggaacaaacctgcaaaagaacctgtcaattcatagcagcctttgttgcatagcagaaatggagtaagaatgagagaacaatctgtaactgccgcaaaagaacgtctaaaatgtatgatccattatgaaaataacattttagacgaagaaacaatgggatacatacggagagacataggaaatgtgatcacgaagtatgtggatgtggaacctgagaatattgagataaaagtgattttaaaagaatacaagaagagagaattacaatgtttaaacagtacaaactgaaaaattataagttcatattggttctatttgtggtgatcttaaatgtgatcggaatccttctgattggaagtgccaagccgtcggttcagggcaaacagatcgtcggtatgatcgcagggctttccattatggtgatactttccctgatcgactacaatttcattctgaaatttgcgtggctgatctatctttttatgctcggaacacttttgcttgttatgtttgcgggtgatgatgccggaggtgcgcagcgctggtttgaaatcggaggtttccgttttcagccttctgagctggcaaaaatcctgatcatattgttttttgcctattttttcatgaaacatgaggaaaagatcaatacgcccaaggtactgatcatgtcacttatactggcaggaataccgcttgcgctgatattaaagcagccggatctttctacaacaattgttactgcattaattttcgcagccctcttgtttgttgccggattaagttataaaatagtagtaggtgttttggctgtcagcgttccgtcagcaatcatcttatttacactgctgatccaggacaagcttccgtttatcaagagttatcaggtgacacgagtaatggcatggctctatccggatgattatccggcagacgcttaccagcagcagaattccattatggcgatcggttccggtcagctttggggaaaagggctgaataacacagatgcaacttccgtaaaaaatggtaactttatcccggaaccacagacggattttatctttgctgttgcgggggaagaacttggatttattggaacggttatcattataattttattgcttttcatcacaattgagtgtatattaattgctagaaaagcaaaagataccgcaggtaaaatgatctgctgtggatttgctgcactggtaggctttcagagcctggttaacattggggttgcaagtggagtgcttccaaatactggtctgccgcttccatttgtaagttatggtcttacgtcattgttatctttatatataggggtggggcttgtattgaatgttggactacagccgaaaaaatattgacaggaggtaaccgcacaatgaacattggacttattgcgcacgattcaaaaaagaaattaatgcagaacttctgcattgcatatagagggattctctcgaagaatgaactttatgcaactggaacaaccggaagactgattgaggaggtaacgaatctcaatgttcataagtatctggcagggcatttgggaggttcccagcagcttggcgcacagattgaacataatgagatcgatctggttattttccttagagatccgcttactccgaagtcacatgaaccggatgtcaataacgttgtaaaattatgtgacacacacaatatcccgttggcaactaatcttgccactgccgaacttttgattcgagcattagacagaggagatttagagtggcgtgaaatgtacaaataaaatgagactgctgtgtctttgtggcatagcagcaatttttatgtccggatgcggacagaccgttgtcagttatgacaatccttatgatatctatgcaacttccgcagattacggactgacttctgagggtgccggttctgaaaaaacatatttttcccagaatctctgtgtggcagatgatgtgaatgtaggaatggaatctacggattccaaagttgcagaaggtgccggaacttttaatcttgcaacgaatacagtaacttatgcgcagaacatttatgaaaaattatatcctgcaagcacaacgaagattttgacagcatatattgctttaaaatacggtaatcttgaagattacgtaacggtcagtgagaatgctgccaatcaggcttccgattcttctgtctgtggtctgaaagccggagatgtggtacagcttaaggatcttttatatggaatgatgttgaagagtggaaatgatgctgcaatcgcgatcgcagaacatctcggcggaagtgtggaaggctttgctgatatgatgaaccgggaagcacttgcaatgggtgcaacaagatcccattttgtcaatccaaacggactcccggatgagaaccattatacttctgtgtatgatctttatctgatcttccagaatgccgtccagaatcagacgtttgtcgatattatcagcacaatgagctatgatgttgtatataccgatgtgaatggttccagcgttgagaaaacatgggagaatacgaaccagtatctgaccggaaaagagaaagcaccggaaggtatcaccgtagtaggcggaaaaaccggaacaacaggtgccgctggatactgcctggttttgtattcttataatgcctccggacagccaatcgtctccattgttttgaaagcggacggcaaatcaaacctttatctccttatgaatgagatgttgagcggttttgcgaattaacagttgtattttatgtgcatatatactataattgttttataaaacctactgtttttattcaaaatacataaaacagtgcatataaggaggaaatgacaatgatagaaattattgcaggcgaaaaaggaaagggcaagaccaaagaattattagccaaagtaaatcattctgttgcagccgcatccggaaacattgtttatcttgacaagagtcagaagcatatgtacgaactgaacaacaaagttcgtctcatcaatgtaatggattatccgattgataattgtgatgagttccttggtttcttatgtggaatcgtttcacaggataacgacctcgaagagatgtatttagacagtttccttacaattgcatttattgagacggatgacgagatccagcatgcaattgaaaaacttgatatcatcagtgagaaatacaatgtgaagtttatcttaagtgtttccagagatgagtccaaattaccagagtgtgcaaaagcaaagattgtcatttccctataattactttgctgttaaaaggttgctgcgctaacttgttttagtgcagcaaccttttttgcatacaaatcaatcccagtctttttctaaacttcgtctccacttttgattcttccataaaggctgatcgtataaagacctccgatacctacaagcgcatatataatgcgggagagccacgaaagatttccgaaaagaaaagcaaccagatcaaagcggaaaaatccgatcagtccccagttaatggctccgatgatcactaatgtcaataaagtataatccaaccaatttgttttcatgagtaagtctcctttgattctttttgtttattttttcctgaaaatcattttttatacatgaatcacgttgttttgccctgtaaaaaatgctatacttaaaagaagtgagaaaatgcaaggcaggttaaatgattgaaaaaaaataaaaatgttgtgaaatatagaaaaccgatgaattttaatattggtgtcgttatatttgtcatcatctttatttatctggtttttaatgtgttcagttatctgactgaaacgcatatttccgtttatgaagtggagcagggaaccattgccgtgaataatgtatacaacggtctgatcctgcgtgatgaaaagattataaattctgattactctggttccgtgaattattatgtaaaagaaggttccaaagtagcttatggggatctggtatgttccgttgatgaaaatggggatgtctctaatatgatcaacgaagcaaagcaggacggaacaacgatcgacagtgagaatcttgctgatattgaaaaaacaatcaacgactttttatatgcctatgacgggaagaattactatcaggtctatagttttaaggacaatgtgaatgcctctttaagtgaggcactgagtgtcaatgcactgaatgatatttcggattacgttgcttcggctgaaaataataatacgtttcataaagtgatcacagatacgccggggcttgtggcgtattatacggacggatttgaaaatgtgacagtagataattttaccggggcgatgttcgatgaatccaattattcgaaaaccgatttaaaagcaagtccgaccattcaggcaggctcgccggagtacaagctagtcgacagtgaatactggaacattgttgtgccggttccggatgcaactgcggatgctttgcgggatgatgatacgatccgaatccgctttttaaaagatgcaaaagagtcgtatgccacctattccattgtcgagcgtgagggacagcagtatttgattttgtcattaaaaagtgctatggtcaggtatgtgtcagagcgttatgtggagattgaacttttgctgtcagaggaaaccgggcttaagattccaaattccgcgatcacggaaaaagaattttacaccattccaattgactttttcttaaaaggtggagattccagcgatgaaggtattcttagagagcgcacagacaaagacggaaaaagcacgacagagtttgtgacaccgactatatattacgagacagacgatacctattatattgacagcgaatttgtttcttcgaatgatgtgctgcaaaagccggattccagtgaaacatatcgtgtcggtgccgatactgcgacattgcagggcgtctataacattaataaaggttacgctgtgtttaaacagattgatattttatatcagaatgaggaatatacgatcgtcaaaaccggtacaacctatggtatcgcattatatgaccatatcgcattagacggtacaaaaatcaatgaaaatcagttaatcaagtaaggagataaaaataaatgttaaaagataatttaaaaaatgtagaagaacgtgtacaggcagcgtgtgaccgcgcaggcagaaagagagaggaagttacactgatcgcagtcagcaagacaaagccgatcgagatgcttcaggaaatctatgatgaaaatgtcagggatttcggcgaaaacaaagttcaggaattatgcggcaaaatcgaaaaaatgccaaaagacattaaatggcatatgatcggacatctgcagagaaacaaggtaaaatatattgcaggacaggtcgcactgatccattccgttgattcctaccgtctggcagaggagatcaatattcaggcaaagaagaaaaatatcgttgttccgatccttgtggaggtaaatattgcgcacgaggattccaagttcggtatctcggaggaggatgcaatccagttagtggaagagattgcagagcttgaaaatgtccgcattaaaggacttatgaccattgcaccatacgtggaaaatccagaggataaccggttgtatttccgtaaaataaaagatttatctgttgacatcgctgcgaaaaacatagataatgtatctatggaaattctgtctatgggcatgacaggcgactacgaggtggcaatcgaagagggagctaccatggttcgtgtcggaaccggaatttttggagaacgcaattataacaaacaataattgtgccagatgccggaagcagaaggaggcagaatttaaaatcagtttaataggagcagaaaaatgagttttcttgataaatttttaaatgtaatgcgtttgaatccggatgacgatgacgatttttacaatgaagactatgactatgatgacgatgaggaagaagtaaaaccaaaatcttcttttaagaaacgtgagaaggaagatacttttacagatgtttataaagaaaaaccggtaaagaccactccgaaggttacaccgatccgtccttccaagaaacagcagaatctcgccggtatggaagtatgcgtgatcaagccgacatctgttgaggatgcaagagagattacggagacattgttaaataaccgaaccgttgttttgaatgtggaaggattagacgtagagattgcacagcgtattatcgactttacatccggttcctgctttgcaatcagcggtaatctccagaagatttccaattatattttcattatcacaccggcagcagttgatatttccggagattttctcaatatcgtagattcttttgacacgaccagaggactgtagagagcggcattatgaacgaacaggagctttgtaaaaagaagttaatagatttatccagacaggcaaatagaaagggaatcgttttattcagcgatttccttaatttaaatgaactgaatatttatcaccagaatgagaagttttttgagacaaagaccgaatgttctggcggtgttccttttgcagagcgtcagatagttgcatttatacctgatgctctttattatgaatggcagtttccaatcgcatatcttgaaattgagccatcttatccgaagtttgcggagaagttaggacaccgggatatcttaggctctattatgaatctgggtgttgaccggtcaaaattaggggatattgtgatctctgatgatagatatttcctgatctgtgaagaaaccatggcggattattttatggaaaatctcgataagatccgtcatacgatcgtaaaactttctaaagtgtcagcagatgcgttagaacagcagcaaaagttcgaggaaaaagacggtattatcacttcgaaccgtttagacagtgtgatcgcctgcgtttataagttttccagaagtcaggcattggagtttttcaaggcagaaaaagtgtttgtaaatggaaagtgcgtgcagaatccttcgtatcactgcaaagaagaggatattatctcggtgcggggctatggcagatttgtttttgagcgcgagacgggagagacgaacaagggaagaattaaggttcactataaattatatggctaagtgagggcaatagttatggcaaaagatttaccggtaacgttagacgcaagtgtgatttatcatataaaactgacggattcctttcagaatctgtctgcggagttaaagtcactcggatatcaggcagatcagaaaatctgtattgtttctgacactaatgttgcaaaattttacatggaaaaggttgcagctattttaaaagaagatttttcgtccgttttctgttatgagtttctggcaggagaggcaagcaagaatacagatacggtcaatggcgtttatgagtttctgattcagaatcattttgacagacatgatcttttgatcgctttaggcggcggagtggtaggcgatctgaccggatttactgcggcaacttaccttcgtggcattgattttatacaggttccaacctcccttctttcgcaggttgacagcagcatcggtggaaaaactggcgttgattttatgcagtacaaaaatatggtaggcgctttttatcagccgaagcttgtatacatgaatctgaatgttttaaagacacttccgagagagcagttgagctccggtttcggtgagattttaaaacatggtttaataaaaaataatgcttattttctctggatgaaagaacacgaaaatgaaattcttgacttagagtatgatgcattggaagaaatggtttatcagagctgcctgatcaagcgtgatgtagtagaacgtgatccaaaagaaaaaggggaacgcgcgttgcttaacttcggacacacgatcggacatgcggttgaaaaactttcggattttggactgtcacacggtatatgcgtgggacttggcatggccgcagcttcctatatttcttacagacagggaaatctgacaaaagagcagctttcctttatcgaggaaacgttaaaacattttggtttacagattcgtacatcaggacagaatcctgaggatgttttaaaaacaacaaagctcgataagaaaatggttggaaaccagatcaagtttattttattaaaaacaccgggcgatgcctatattgaaaaaaatctgacggatgaacagattttggaaggaatcttatacatttatggaaacgaaaactaatacactaaaaaaagcagtcataggaatgatcttatccgttgttttaatcgtgatcgatcagatgacaaaattaatggcaatccacggattgatgaaccagcagccgtttgtgatacttgatggtattttagaactgcattatttagaaaaccgcggcgcagcgtttggaattttgcagggaaagaaagccttttttatcatttttacaattctggtgttagcgtttattgcttatatttatttgaaacgcattccggacgagaaaaaattccgtctgctagacggcatctgtatcctgttttttgctggggcggttggcaattttattgaccgggttttccgtaattatgtggtggatttcttttattttaaactgattgattttccgatttttaatgtggcagatatttatgttacggtggcagcgtttgcaatgatcattcttggattattttattataaagaggatgactacaataaaatttttccggcaaagaagaaataaacgattgtaacagaatttacgcaggcagtaattgcagcataggaaacaggaattatgcaaaaagaaacatttgaagtagaatacgaatatgagggcgagcgtctggataagtatgtgagcatactttttccagagcaatcgcgctctttttttcaaaaattaatcaaggacggaaatgtctctgtaaatgataaagtgcagaaggcaaattaccgtttgaaaacagaggacttggtgactgtggagattccggacgctgtggaaacacagattttgccggaagatatcccacttgacatcctctatgaagatgatgaccttcttgtagtcaacaagccaaagggaatggtcgtgcacccgtccgcaggtcattacagtggaaccctggtcaacgcgatcatgtatcattgcaaagacagtttatccggcatcaacggtgagatacggccgggaatcgtacaccgcattgacatggatacgacaggttccctgatcgtctgcaaaaatgacgagagccatatttttattgcggaacagatcaaggagcacagtgtaaaccgtagataccgtggtatcgtctatggtgttgtcaaagaggatgaaggcaccattcatgcgcctatcgggcgacatccgatcgaccgcaagaaaatggcaatcaatgaaaaaaatggaaaagatgcaatcacccattataaggtgttagaacgttttgacaaatatacctacatggaatttaagttagaaaccggacggacacaccagattcgtgtgcatatggcaagcatcgggcatccgcttttgggcgatacactttactcgaatggaaaaagcccttataagcttcagggacagacgctccatgctatgaccattggctttattcatccgaaaaccagagaatatatggaaatctctgcacctttaccggattattttgaaaagatattacgtgatctgcgttcatgaccactttaattatgcaaaaaatataatattcttatcttatagtgtggattttcaatgaaaatgtttgaaaattcaaaaaaaatcttttcaatttttataaaatacgctataatatagttaaataaattttgtgtaaaggtgggattgatatggcaaataaaatatatacgatcggtagagaatttggcagtggcggaaaaaaggtgggagagaagcttgcagcaaaacttggcatcaagctttatgataaggaacttttgcagcaggctgcaaaagacagtggattttgtgaagaaatcttcgaaaaccatgatgaaaaaccaacgaacagttttttatattcgttagtcatggatacatattctgtcagtggttattctgcagcaccttttttggatatgccgttgaatcacaaggtatttctggcacagtttgaaacgatcaagaaaattgcagaaagggaatcctgtgttatcgtaggtcgctgcgcagattatgcgttgtcagataacccggactgcatcaatgtctttattcatgctgatatggataaacgtatcaagaatgtcagcaagaatctgaatattacagagaataaagccagagacattattaataagacagataaacagcgtgcaagctattacaactattatacaagcaagaaatggggagattcaaagagttataatctttctctggatgctggtaagcttggcactgataactgtgtggaaatgattttaaaatatcgtgaattgctcgacgcaatgaaataaaatcttctgcaaatgatgcatctacaaaaaagtaatacttttgtaaaatgatgtatacgttggtacataatataataataaaagtaaaataataaatccctcatggagaaatctctgtgagggattattgtatgtttcgcaagccaactattcgttaaacttgtgttttgcgaataaatgaatttgtaggggggtgtaaatacactcttattactaaatgattagaatttgcttcaaaatcaagcaatttaataaatgtgtatgaaaccatttttaactaacatatttcagcagaatccaatatgatcgtaaatggtccgtcatttaaaagcgaaatcttcatatcggcgccaaagattccctgttccacaacaggaatttcttttttacactggtcaatgatatattcgtacattttctttgcaatatcaggttttcctgcatttgtaaaagacggacgattcccttttctacagtctgcgtataacgtaaattgagaaattaacagtaattcgccctgaacatcctgcagggataaattcgtttttccattggaatcttcgaaaatccgcatcccaagcagttttttgatcattttatcagcaattggtaatgtgtcctgatccgaaatgccgataaagacgagaaaacctttctggatacttccggtaacattcccttctacggtacaggatgcgtttgtgacacgttgtattacgaatttcataaatagtaagctcctttatttggttttattttcaggtatttgcaaaaaagaacacgattggtttgtaatttgcatacagatttattataatagattcatagtgttatggaaaggtaattttaaatggaattacaaagattactaagtttgacaagaaaagccgtggacgattatcagctgatccaggctggagataaaattgcagttggcatttcgggtgggaaggactctctcacgctgctctatgccatggcaaatttgagacggttttatccgaaaaagttttcgctgatcgcgattaccgttgatctcggatatgaaggatttgatcttacagaagtccgaaaattatgtgagaatttggatgtggaatatcacgttgtacccactgaaattgcaaagattattttcagtgataaaaatgagtcatcgccctgctctctctgcgctaagatgcgtaaaggcgcattgaaccaggcaatcaaggagttaggctgcaataaagtcgcgtatgcgcatcatatggatgatatgattgagacaatgtttttgtcgatgatttttgagggaagattttactctttttctccggtcacgtttttagacggcatggaactgacagtgatccggccgatgatgtatgtatctgagtcagaagtaaaaggctttcggaataaatataaccttccggttgtgacgaatccgtgccctgtggatggcgctaccaagcgtcagtacgcaaaggatttaatccgtcagattaatctggatcatcccggtgcaaaaaagcggatgtttacggctattttagacggcaatattccagggtggccgcagaagacgcaacatacaagaggagaaaaaagcagatgaaagaaaaagcgtattttgaaaaagtaaatgtaaaaaatgaaacactgctccgtaatcttctcacaaaaatgccgccatactgtaaacagttttttatcggcatagagccgactacctcatcacgtactcgaatcgcatatgcatatgatctgaattgcttttttgaatacctccatgaaaataatccagagtgtgcaaaaaaagatattacggagattccattgactgttttgggcaaccttgcaccgatggatattgaagaatacctctcctatctgaaatattatgaaaaggatggcgttgaacataccaatgatgagcgcggattaaagagaaagcttgcttctctccgctccttctaccgttatctatataaaaatgaaatgatcgaacaggatccggcagtaaaagttgatatgccgaaaatacacgaaaaaacgatcacacgattggatatagatgaagttgcaaacctgttagatgaggtggaatccggcgaaagtcttacagaaaagcaacagaaattccatgaaaagaccaagacaagggatcttgcaatgatgactttgctgcttgggaccggaatccgtgtttccgaatgtgtcgggcttgatatggatgatgtggattttaaaaataatggcattaaaatccaccgaaaaggaggcgccgaagttgttgtttactttggcgaggaagtccggagtgctttgatgggatatatggtagagagacagaaaataacggcggcagacggaagtgtcaatgcactctttctttcgttacagaaccggcgcatcagtgtgcgttctgttgaaaatatggtaaaaaaatattctaagcttgtgacaagcttaaaacatatcacaccgcacaaactgcgaagtacttatggtacatcactttaccgtgaaactggtgacatttatctggttgcagatgtgttaggacataaagatgtaaatacaaccagaaagcactacgctgctattgatgatgaccgccgcagaagtgctgcaaaatatgtgaaactccgagaaccataaataagtaaaaaaaatttgacttgaaaaagtgcagacgaaagggaaactagatattgatttctttaaggatattaatgataaaaatcgtttgtgggatttccttgcacatgcagaccgtactttatatacggtaaagaaaaagcagaaaaatgattttctgctgatcaatgattttcgttcatagaaaacagaatgcctccgaaaaatccaaacccaagtccactatacccgataaggattgttgtccattcaatccattgggtattgtagcctgttacagtaccggcaataagacataatatcaatggaatgacaatcgcgaaaatggtattcataaaaagaaaccaataaacctttgttgtatagctccattgcttttgcattgcacagttccataattttctcataagtattcacctgatcattcataattatttggcaatgagttttgtcgatataggacttataacagactcttcattgccatttcataatcatattatcgtttttcaggtgaaaggtttctatcagattcccttaaaattcatgtaaaataaaagtaaaatgatgcttaaccagaaaccggctgggaagctaatacttcactgattttctcgttaatacggtcttttaccaatgctgctatctcctgcgttcttaaagagccatattcctcaaataaaatcggttttaaataatgaacctgcgttgtaacaggaccaagccagaaactgttaaatacacggtaggaatcgatcagagctaccggtatgatcggagcctttgtctttaacgcaatcttaaaactgcctgccttaaaatcacatacatggttgcggttattaaaatcgtagccgccttccgggaataaaatataacgctttccgttcttaacatcttctgatacttcattgatgatcgtcagtgcctgacggacatcctttttatccagacgttttccttccagcagatcaataaactcctttacaagaatcgtattggatttggctttatccataacaatcgagcaaggtttccgatgtgtatatacaattcctaatgcatcatactttccctgatgattgggatacatcatatagccaccctcctctgggatattctcctgaccatatgctttcgtatgaatacctccggtaactttcatcaggcggatacagtgtcttgccagttcataacgttcttctacagagaacttgtcaggataatccgcttcccgccgcatcttaggtatcatataaggggcacgaaacagattcataaaaataacatatataaaacgcaacataaaatataaactcacttccaatagaattactctgtcattgtgatgaaattcggatagacattcacaatgaagcaaagagtattataccctattctgccagaattgacaactttgcagggctggaagtaaaatgaatttaattctcagcaacggtaacactgctataatatggaatcgtaatgtactgccctgcgtggatctcattctgtgaaatcttattgatcgagcagacttcattgatataatcattcatatcatcataatcgtctgttatatgttcggatgcgattgaccacaaggtatcaccgctttttacttcaatacttgtatagtatttgcaggaaatctcagatggtgctgcctgtgtgtggatggcgccaaataaaaagatacagataatcattataattgcgatcagcgcaatggatgtcaatgcaatcttctgtctgcggacaaccatgcgtctgttgttcgatacactatcagaccgcatatgactggatgcgctgtcagacatatggtaaactctgttgctaactgtactgctttcatttctcataatggtacctccctgaattatcaattgtgaaactgtgagattcatatgtttctatcatcgaacatctgttacgaacatttgtttgcatattcatatcatactattcgaacatctgtttgtcaacagaaaaatcgaacaaattttcggaatatatgtttgcatttgaagatatggtatggtatcataataaatagatagaggattcgttatattctctgaatatattggatttttttaattatcaggatgcattatttagataaaggagacattttatgccaggtaagatcagtaagaaacaaagcgagattttagaatatattaaaagtgagattttgagcaaaggatatccgccagcagtccgtgagatctgtgaagcggtggatttgaagtctacttcttctgttcactctcatttagagacattagagaagaatggatatatccgcagagatccgacgaaaccgagagcaattgagatcttagatgatgatttcaatctgaccagacgggaagttgtgaatgttccgatcgttggtcatgttgcagccggacagccaattcttgcaactgagaatattgaagattactttcctatcccggttgaatttatgccgaatcaggattcttttatgttaaaagttaagggtgaaagcatgatcaatgccggaattttagatggggataatgtacttgttaagcgtcaggcgaatgcagagaatggtgatattgttgttgcacttgtggatgattctgctacggtaaagactttttataaggaagacggatattatcgtctccagccggagaatgatacgatggatccgatcattgtagaggattgttccattcttggcaaagtatttggtgtattccgcttcttccgataattacattttctacataacataaaagcggttttcgaagaaaaaccgctttttgttttttataattcttttacatccacaacttttccgtctctccatgttctctcaagatcatagaaaagacgatcttctttggagaagatatggataatgatatcgccataatccattaaaatccaggtagaactctggtttccttcaatctgctggacttttacgccggctttgtataaggcttcatcggcagcgtcacgcattgcctggagctgattctggtttgttccgtttgcaatgataaagtaatctgcaatcggagaaatttcactgatatcaataacagtcacatcttctgcttttctgtcttctaatgcagctactgcaagttttgtaagttcttttgatgtcataaacgatgttcctttctgctgaattatgtaagttaaatcctgtgcacattggtgtgcataggattgtcatataacgtattgttttagagcgtttctttgtaatgtttgtaatattcataggtcatctgggttgtcggatcaatgtttccaccacgctttttcagatagaccagtgtgtcgtgcaatatttcggccatacagacgtctaaatcgcgaaaggctaattccctcacgagatccaaatcatcggctttattgcggtttggttcgatgtaatcggcaatataaatgatcttgtcaaggatattcatatccggctcgcctgtcgtatgcactttgatcgcatgtaaaacaagcggatctgtcaccccatactctgtttttgcaagtaatgctccaagttttgcatgaagcaaaaatggattttcacgttctatggatgagataagaatgtcattttcttcacatagtcttaatttttcatcatttggaatgcatttggcacagtcgtggagcagacctgccagcatggctttctgcatatcatagccatatgccatggcaagacagccggcggtgtacatcacacctttggtgtgctcgtagcggtctttatcctgcactttttttaatttttttcgtatttctaccagttccatatcgttatcctctgtcaaatgtctgtcaggaaatgcatgaaatcattttctgctttcataaagctgatgttcttttataaaccggatcacagaatccggaagcagctgatcggtatttacgccatttttgatctgctggcggatatctcttgaggcggcatcaaaacgtccacaggaaagcggataaatcgctgcatctaactgtttttcgattgcgttgatcttcttttttatgtcgtccatatcccaatggtcacgtaccgccactaataccgccgctttttcacagataatctccggatgtctccactcttcaaaataatctagtgaatcagctcccatgataaaataaaatgaagtatccggatacctgttttttaaatttgtaagcgtcagatatgtgtaacttgtctgttccgcttctatctccattgtagataatttaaaatacggatatggcttaattgcaagcgcaaccatttctgcgcgtaactgcggagaagtcatagcgttttcatttttattcggagagtgtcccgccgggataaaccagacctcgtcaagctgaaaatctgtgtaggcagcttttgcaatagcaagatgtccattgtggatcggatcaaaggaaccgcctaaaatgccgatttttttacctgataaatcattcatgatcgttgtcctttgctgtgataagctttattttacaggtaattcgtatttggtattcttttttgcctgacggaaaagaatgattttctttccgattacttttacaacaacagaatgggtacgctctgcaatgatttcggcaatctcgcgtggatcatctgcacagttttttaatacagaaattttaatgagctcacgtttttctaaagcttcatcaagcccgttgataagttctggtgtgatgcttgcttttccaatctggaaaatagcgttcattgtgcttgcttcgccacctaaataagcgcgctgtttgcttgtaagattcataattccatacctttcttttcctattatttagaatgattctgatgtactttctgttcagaaaaaagtacgatcgttacgtttatttgtagtattcaaaggtgtgtccgtacatttttacagtgtcaccttcctgtattccgtgttcctcaagatcatctaaaataccctgctcttttaagaaacgctggaagaaaaggaagcctttttcagattcaatgtttgtgtaaccaagcattttttcaatcttaggaccttcaacaacaaaggtttcatcatcttccatagtgatcgtgtaaggatcatctctaaagaaacgcaatgcaggatcgtattcctgttcgtaaatgacaggttctctgccgcatgtctctaaaagctggcttacatgatataaaagttctttcagtccctgtccgctgactgcggaaatcgggaaaactttgataccgtctttctcaaactcgtcctttaatgccttgatgatctcattttcatcaccgtaaatggaatcaattttattggcagcaatgacctgaggctttttcaaaagttccggatcataagcggcaagttccttgtcgattgccttgatatcagcaattggatcacgcccttcggttccggcagcgtccacaacatggatcatcactctggtacgttcaatgtgacgtaaaaactcaagcccaagtccaacaccctctgaagctccctcaatcagtcccgggatatctgcaatgacaaaccctttggcgccgtctaagtcaacaacaccaagatttggctgcaatgttgtaaaatgatagttggcaatcttcggctgtgcattggtcacgcgggataaaagggttgattttcctacatttgggaaaccgaccagtccaacgtccgcaatcacctttaactccagtttcacttcaatctcaatgccttccccacccggctgggcgtattttggcgcctgcatggtcgcagttgcgtagtgggaattaccctgtccacctcgtccgccttttaaaatcacctgacgtttgttatcgccggacatgtccgcaatgaccttatcggattctgcatctttgatgacagttcctgccggaacttttaagatgagatcggcgccgtcttttccatgacatttcttcttgccgccttcttcgccattttcagcagcaaatttgcgtctgtgacggaaatcagtcagagtatttaaaccttcatcgacaacgaagatcacgtctccaccgcgtccgccgtctccgccgtccgggccaccatttggcacgtatttttcacgacggaaactgacatgtccatttccaccttttccggattttataataattgttgctctatctgcaaacataattttctcctataaataaaacagtttacctgtcgacctttcctgagaaaggcagtcaaaacaataagaacccggctatctttacaaatagtcgggtccattgttcatcttattattcagctactggataaacggaagcctgtttcttgtctcttccttttctctcgaatcttaagataccatctgttaaagcgaataatgtgtcatctccaccgattcctacattaacacctggatgaatctttgttccacgctgtctgtaaataatgttaccagcctttacgaactgtccgtctgctctcttagcacctaatctcttagactcagagtcacggccgttctttgtagaaccaacaccctttttatgagcgaaaaactgaaggttcatattcatcatgtcttacacctccttgaatgttagaatgatataatcatttccataagtattttgtattccttgtaagcctaaaaccaaggacttcataagcaaatcagcatcatgacctgccggtgaatcaaactttaatgtgatcatcccggtctcttcatcagaatctgtagaaaacttctccttcgtataaataccaagggaattgattgtgttgatcaccagtgcagaaattcctgcacatacaatgtcttcaccctcttctgcatagcctgcatgtccgagacagtcaaatcctaaaaatgcctgatcctggtttctgaaaatcgttatcttagtcataacaatcttcctatcgattacgcattaattttttcgattttaacctgtgtaaacgcctgtctgtggccgtttttcttgtgataaccggtttttctcttatacttgtaaacgataacttttttacctctgccttctttaactacagaagcttctacagttgcgttagctacatctgctccaactttcattccgttgtcagaaactgctaatacctgatcaaaagttactttctcaccagcttcaacaccaagtttttcaatggtaatgatatcaccttcggaaactttatactgtttaccacctgttgcgataattgcgtacatatggcacctcctattatcattactcgccagttgtggtttctgcaaatgcgcagaatttgagacctcactgtgcggcatacttcgttactatagcataacaattgaattacgtcaactggttttttgaaatttttctaacctttttagttaaaacctatttttataataatgatttttattcacatacatcttctcatctgcaactgacaaattcttttcaatgtcctttgcatgttctaaccagacacttccaatggaagccgaacattcagccgtccatagctttgaaagcttttgcagcttattttgaaagtctgtctcgcttttatcgaatgacagaatgataaattcgtccccgccaaaacggtaacagcctgcctcctggaatatggttatgatttttttcgcaattgctgcgagcagctcatctcctgcttcatgtcccagattgtcattgattttttttagaccattcacatctgcaaaagcgatgccaaccggctggttacacatctcctcgtcacattcgatgattgcaatatctttgtaatatgccttacgggttttgaatcccgttaatgcatcccgctctaattcagatatctgcgaattaatctctatgtattgctgtaaagattttatatggttttctttcgaatattcaataatccggtctttataatagtttttcgcctctaatgcctctaaaatcgcgtctttgtccattttgccaacagcgtatacatatattaattctgcaaattcaagtccaaccttgatttcatccggatatttttccatatactgattcatggatcgtaaaatgtggttcataaggttatcatcacaagaatctcttccacactcaaacagttcccggcaggcatccataaattcagccgcgtacatttcatccattttcgaaaggatctgttttttgtaagtctcatatttttctggctgttccaatttataataaagtgttgctgcacagcgggtggcatcatccggaacgattgtatctgcatgatattggctcactccaagttcaaacgcctttaaagcctctgttaaacggttcagtttctgaagtgaaatagatttattgatatagatataagcacccatttcctcatcacagtctttcaggacgtcttctgcgagcgcaagacttttaagtgcttcctcgtagttttgttcctcaatgtaggtcaatgcaatattattatactcaaatgcataatagtatttttcatcattttccatggcaatttttaatgccgtttcatagaaaaaacgggaaacattatattctgtctcgcaatgtgttgccacacctatcaggttaaaacaggacaataacttaggggtatacggatagctttgatagtccactatgattggttctataatctctatggtttttctgaaatttccttcctgataaaatagctgcccataataaaaacttgcaagtatgcgcacttcggttttgtcgtatttctttttcaatagctgttcataaaaatttttctgctccgcaatagacagtttttcgatttgctgttgtctggttaaaaaatcgttataattcatattcaacattcctcatttatcttttggaagattcacttcttatttacaacattccctaattcaaatcatatcatattagacacaagattagcacaataaaatgaaatatctgcatatgtagatatttatactaatgttaactagcttttacaaataaatgtcaacttctgtaagtaggcatgttgacaattaaccatacttcgtgctactttaaaaacaattgaatttagaaacttgtgaattcacactgtaacttatttgaattttgcaaacgtaacaaaggagtacaaaaatgacaacacaaccaaagacaaccgaagccgaaaatccatatcttaccagagaggatgcccttgcaattttaaatacaccggatgagcagttagacgagctgattgcacgcgctgagaaactgcgccgcaaatacaaaggagacaatgtcggaatccacattctgacaaacgcaagaagcggcaactgttcccaggactgtgcttactgcgcgcaatcctgccggtcttctgctgatattgataaatataaatgggtatcggatgaaaaactttaccgtgataatgactttgtgaataagaatcatctggcaagacactgtatcggactgagcggaatgaagttctcagacgccgagattgaagaactcgctgcaaaaatccgtaaaatgaaagaaaccggaacacacctctgctgttccatcggatttttgacagaaaaacaggctcgcatattaaaagaggcaggacttgaccgtattaaccataacttaaacagcagccgtgcattttatccgaacatctgctctacgcatacgtttgaccagcgtgtcgcaaacattaagatgttacagggactgggctacgaaatctgcagtggtggaattatcggcatgggcgaaagcaaggaagatgtcgtagatatgctgttagaactgcgtgaaattaatccggaagcaatccctatcaacttcctgcttccaattgagggaacacctttagcgcacaaggacacttctgctttgactccggagtatggactgaaagtgctttcacttgcaagacttcttgttccacaggcagatatccgctgtgctgcaggacgtgaggtttattttaagggggaagaaaaaagactgttgtctgttgtaaattctatttttgcctccggttatctgaccgaggacggtcagggtattgaagatacgatcaaagtgattgaagacgccggattcacttatgagattgaatctgcataacgcaatggaacaaagagttgcatagcaactctttgcgcactgatgcgcacaagctttagcttgcataattcttttgcccattagtctttaagctgaattatccgttcatttttaaactgtcacgcaaagattttttgattttttttcttgtcacttctacaagaccaagtttggtcatatcaatgagatctgcttttaccggatcgtcttttaagtaagagcggaactctcttaagagtatggcttcatcttcttttgccggaaggttaataaaatcaatgataataatacctgaaatattgcgcagcctgagctggtatgcaatttcttttgctgcttctaaattaatgcggagcagattttcacgcattccctttttcacaatgttttttccgctgtttacatcaatcacggtaagcgcttctgtgtgctgtaatacgatcgatgcaccggactttaaccagatctgctctctcaatgccttatctaacgaagtctttacactgtaaagagaagaaaggctgagcattgtatcctgataatacgatattgttaaattattatcattcttttctttatcacaacctgtcgttacaaattgctcgctggcaattccataatccatacagatcgtttcaaaaatatctttgtcgtccgtgatgatctcacagatagacccctctttctgatttttcagatcttccagataagacggttttgcctttttaagcacactgtaacaggttttgtgaactgcactttcccgcatggtacaccactcctgctctaatgagcggatctctgaaagtaaagtctcgtccggaacgctcgcagcattcgtgcggatgataagcccgtagctgtcggtgtcaaattcctgtaataactctttataatacgcccgttgctcctttgtcagttttgaggagataccaagccttttgttggctgtggtgagtacagcgtattttccggcaaaacttaagtttgcagtgaccgcaggttcctttgtctttaatgcttcacgttcaacctgaaccagaagttcatctcctgccacaagttcttttttggcagaaagttttttggtgaaatgtgcattcttaaggtcatctaacgaaagataacaggtctgatccggcgagatttttacaaaagctgcacggatattctgcaccacattttcgacgcgcccgatataaatgtttccaagtaaactatcttcgtccggaggagtcaaagttacctcaagcatttttttatcctgattataaagagcagaaacaataaagtcctgctctttctggttttgcatttttattttttcatgcgtgataatatacttattcatagcaaacctcataaaacacattcgcaactctttgcgtgctcgcgcaagctttaacttgcaatattcttacgcaatttcttcacccatatccagcagggaaatgaatttgtcattctcttttgcatatacatcaatacgatgaatctggatcgcattggcattataaggaacattcatatagttgaaaagagattctaataccagttccggtttcaaattatcggagcttcccgtgctgagattgatgtaaaattccggtgtttcttctgtgccttctgctttaaactcataaactaactgctttaagtccatgattttttcacttttctttgtctgctttgtaataagcacttccgcaggttttgtaaagtacgcttcgattgcctgttctacttctgattttgtaaaaggaatgtcataaccttctttaaagaaaagcctgtaatctgctgcggcaactaaggacatcgccgttttggcgttgtccggaagcttcacatagccagtgatctccacaccgtctaccattgtgtcattaagatcagcaagtgtctcacgggtggatttgctggaatgtacttcaatatctaaatattcaccgtcacttgtgataccgacaccaagcggtgcagcaaaggacatgatctgatgcggggaaaaaccctcggaataacagatatcaatatcagccctgcgcattgccttctggaaatagcgcataatatccaggtgtcctatgaacttcataacaccatattttctaaatttaattcttattttcaaaacagacacctcctccaaatttcatggcaccacagccggaacatttcatacggcagttcggtgttactttttcgtcatgtgcattctgccattcacgttttaaaaattctttggagactccgatatcaatgaaatcccaagggaagatctcgtcgagatcacgttctctcatggtataaaaatcggtgtcgattccgcactctgcaaaggcttcttcccagcgtgtgtaatcaaagtactcgctccaggcatcaaaaatgccgcctttttcataaacttttaagagagcctgtccgatcttacggtcacctcttgcaaggataccctctaaaacggttacatctgcctcatgccagttatacttgatactcttatggtttaactgtacatgaacgccctcgttcacgatacgtgctctgccaagataatctcccggtgtatacattctcgcccactggaatggtgtaaatggcttcggaacaaagaaagaggtactgatcgtaatctggcatttgccgttacgcttctcctttggaaccgtgtcataataaagcgctgcaatctcattggcaagctccgggattgctttcatatcttcctctgtctccgtcggaagtccgagcataaagtaaagttttaccttattccagccaccttcgaaggcgagtctggaaccatttaaaatgacttcttcggtaagccctttgttaatcacatcacgaagtctctgggaaccagcttccggtgcaaaggtcagactgctctttttaatatcctgcactttgctcatgacatctaaggaaaatgcatcgattcgcagggaaggaagggaaatattcacaccctttcccttgaactcatcaatgaggaagtttaccagttcttctaactgggaatagtcagaggagcttaaggaacttaaggaaatctcctcatgtccggtggattttaacattttataagcaagttcttttaagtgttctacatttttctcacggaccgggcggtaaaccattcctgcctgacagaaacggcagccgcggatacatccacgctgaatttcaagcacaacacggtcctgcgttgccttgataaaaggaacaaccggtttttccgggtaaacagcgcttgtcatatccagtacgatctgtttttgtatggtctttggaacatcctcataaatcggttcaaaagatgcgatcgttccgtcctctttgtaagtcacttcataaagagaagggacatagataccaggtactttggatgcctcatgtaaaaattcatgccgggattttccctctgcgcgcatttttttatacaggtcaaacagttcatagaaagagatctcgccctctcccatatagaacagatcaaagaaatccgccattggttccggattataggtgcagcagccgccaccgatcacaagcggatcatcttcggtacggtcttttgcaagcagcgggatctgaccgagatctaagatctggagcacattggtataacacatctcataatttaatgtaaaaccaataaaatcaaagtctttgatcggctcctgtgactctaagccaaacaatggaaggtgttcttccttcatgattttatgaagatctggccatggagagtagacacgctcgcaccatacatcttccattttattaaacatatcatataaaatctgaacgccaagatgtgacattcctatctcatatacatccgggaagcacatggcaaaacggattgcaattttttctttatcttttttgatactgttcaactcatttccgatataacgcgccggtttatcgattttcatcagtatctcgtctgataatgctaattttgtcattcggtttgtcctttctggtttatccttgaaaacatagactgcaacatcagtcatgttcacttatcataacataatcctgcaaaattgtataatactgattatcggaaatgatgtcaatgacatcttttgcctgataaccacaaaattcatattgattgtattttaagatcagaaatccgatcataagaaataccgcaaacacaatgcggattttcaagaaaatccacggaataaaagtttgcgcttcctccggctctgtgtcaggcatctcctccgggtgatcaaaggctctgcggatctcccgcacatattcctttcgccttacggcatattcgtctgtcatagaataagactccatagattttcttgataaaatcatatgaagtcctctatttctttagaactaatattccagcctgtcttagaattttataaaacacctcaaaaggtgttttatttctgcgtcatatgcccgattctttcttctaaaaagaaaatggcatgctctacccatgaaatgattgttttatctaaaatcactgccccaatcagagaaaaaagtaacgtgagcacgatcataagcaatgatccgccgatgacaccaaactgaaccggagatacatgaaggatctgttttaccacataatgcaggacaccccagtggatcagcagaattccaaagctgtagcggctgatcagttttgtgaaaacagtttcggtgtctgtgcttcgataaatctgttttaccagaagaaaaacagccattgtataaaacaccataagcggtgcattgttaaacaaataacgatgataagctgcgccactgaaaatatgccgcactgcaagacagacggacaatattcctgcgccgtaaaccagataccggaagctcttacggtgttcttttgtcaggtaataccccagaataaatacacctgcaaaggagccgaggataccggatgcaaccgaattatcatacatggtatcccaataagttcctgcaatctgaaaaacaagtatcacaagtacaagcccgcttaaaacagaatccgggatatgctgcatcagataacggatcagtggtgtcagcacataaagccagatgatcacgtagataagccagaaatgtggcgcttcctccggtgatccggttaagatccgtttgatcatggcgccccagtgatccgggtacagccagacaattccctctttggcgcatacatataaaatgtaatacacaaccattggcacgaaaacttttacaaaacgctttcggtaaaactgtccggcagattcgccttttactggcaaaagaagcgctccgcttatcatgataaaaagcagattgcagcacaaaaacaggtaattgcagatctcgaagccataccagcttacactccgctccggcactaacgtggagcctagggataccgtgtgaacagcaatcacgagaatggttgcaagtacccgtaattgatccagataaacctgtcgttttactttctctgtgaaagctcctgtgtgatttcttcccatgtgatatccttttctgccattaaaaccataaggtggtaaatgtaatcagagatttcgtattttaaatgctcatgatccgtgttttttgcggcgatgatgatttcagtattttcctctccaactttttttaagatgttgtcgagacctttttctaataaaaggtttgtgtaggaaccctccttcggattttccctgcggtctaaaataatattgtagacatctcctaatactttctgtggatttttctctacatattcttttttcacgatctcattgaaaaagcagctgcggtttccggtgtggcaggctgccccaatctgggaaacttttgcaaggatcgtatcataatcacagtctgcggtcagggatttgacatattggatgtgtccggaagtaagtcccttcgtccagagttctttccggcttctgctataataggtcattttaccgttattgatcgttgtatcaaaagcctcctcattcatataagcaagcattaagacttcatctgtgcggtaatcctgcacgatgaccggaaccatgccgtcagagtttttcttaagatcactccattttaatgccggttcaaagttatccattttaatgccggaagctgataactgggatttcatctccataatatcggttttcggattattgatgagagaacctgcgattccgcgcacatttttccgggataaaatcgataagatttcgtcataatctgcgtcatttaagtaaacaacatgcgggacatccgtcattccctctactgcatcaaggacggctttatttaagatgagcacctcatggaaggtatcagccatttcatcctgatgtttgaaaatgaagtccacatttgtcacggagactaggatgcggtcttttccaaaacgattgctcgcctctgcagccaatgccatgctttccggtttggagccattgacaatgacctgcagacatccggcatagatgaacttcttaatgtcctccatgcggttaatgttgccacctgcacaggctttgatctcaatattgcggttaatgttgcggatcacctgaatgttacgttcatgttcttcgtctgtcgttgacaggtcaaagatcatgattttgtcaatgccgctgtcattataaagctttgccagttcaatgacatccggatactcctcgtaattatctctggctttgattgcctttccgtcttttaagtaaattgttgccacgatatttttgtgttccataaatactcatacctttccatacaaaacggtctgcacatatttttgatacgccagaccgcttcttttctaacaatattttcacgtgatgcatgtaagatgttaagttacagacttcctttcgttgaaaggatatctgtgatccttgggtcaatcatggttgcctgatccaatgcctttgcaaacgccttaaacatcgcctcgatcatatggtgattatttccactggaaagaaccttaatgtgaagattcattcccgcagtgtaggaaatcgcatagaaaaattcttttaccatttccgtatccatatagcccacacgatccgttgtaaattctccgtcaaacacaagataaggtctgccggaaagatctaccgcacataaaacaagggtttcatccattggcagaatacagcttccatagcgctttatgccttttttgtcaccaacggctttcttaatggcatttcccaatacgatgccggtatcttcaattgtatgatgacagtctactgcaagatccccgacaacattcacctttaagtcaaacagtccatgtcttgcgaatccgtctaacatatggtcaaaaaaaccgattcccgtattgatcgaggaattgccggtaccatctaaattcaaatgtaatgatatatctgtttctttggttttacgaacataatctgctgtacgtgccattttattttaaacctttctgcttgttttttcaacttaagtaattattaattctttacgattccagatttaatcctcaaaccgaacccggatagaatttgcatgtgcagtcagtttttcacattctgcaaactgcacgatatccttgtatacaggctctaatgcttctcttgagtatgagataatgctggatttcttgataaaatcatctacactaagcggtgagaagaattttgcagttccgttggtcggaagtacatggtttggtccggcaaaataatctcctaacggttcgctggaatactctccgataaagattgctccggcattgcggatcttggtcattacctcaaacggattctttgtcacgagttctaagtgctcggaagcaatctcattgaccgtgtcaatcgcatcctgcatggtgtctgcaacaagaatatagccataattatccaatgacttctggatgatctcttttctggaaagcgttgcaacgaatttatcgacttccagagatacctgctttgcaagttcctcgcttgttgtcacaagaattgcagacgccatttcatcatgttctgcctgtgataataaatctgccgctacaaagcgtggatttgcagtctcatctgcaagtaccatgatttcgcttggacctgcaatggaatcaatgctgacgtagccaaaaacagctttttttgccaatgcaacatagatattgcccggtcctacgatcttatctacttttgggatgctctcggttccaaatgcaagggctgcaatcgcctgtgcaccgccgactttgtaaatctgatccacaccggcttccttggctgccaccagagtggaaggatatacttttccgtcctttccgcatggagtcgtcataatgatattggaaacaccagctacttttgccgggatcacgttcataaggacggaggaaggataaacggcttttccgcccggcacatagacaccgactgtttttaacggagttactttctgtcctaagataataccggattcatctgaatcaaaccacgagtactgcttctgttttgcgtggtagtcgcggatgtttaccagtgccttgcggatgacatctaaaagctttggatcaacctgctcataagcttccttaatctcatcctctgtcactctgatattgtctttattaatgactgcaccgtcaaattttaacgtgtaatcaaaaatcgcttcatcgcgtttttcgcggacattctggataatgtcgttgacacggctctcaaattcaccgtaagaattcgggcttctttttaataaattttccaatatatttgtctgtgtttctttggtcagttttaaaattctcattggattgtcttcctttcactatcatcatttcggctatgcctgatttttgatcacgtttttcagatcggcgatcagctttgtgatacgttcattttccattttcatgcttacctgattgactaccatgcgcgcagaaagcggacacacttcctctaatacggtaagtccgttttcccggagtgtggaaccggtctctacgatatcgcagatcacttcggagagtccgacgatcggcgctaactcaatggaaccgttcagcttgataatctcgaccgtctgatgttttttattgtaaaaatagtctttggcaatatgcgggtacttcgttgccacgcggatcagttcgtgatgctgcaacaggtcgcgtgcttcctccggtccgcagatacacattcggcatttgccaaatccaagatcaagcacttcgtaaatattgcgcccctcctctaaaatcgtatcttttcctacgattccgatatcggcagcaccatattctacataagtaggaacatccggcccttttgcaaggaagaaacgaagctttaattcctcgttcacaaagatcagtttccttgtgtctttgtccttcatctcctcacaggtaatgccgatctgttcaaataattccaaggttttttttgcaagtctgccctttcctaatgcaaaggtcaggtatctcatgtcttccattgtctaatcctccataaaaatcactgtctggatacgattacgctttgcatagttctggtaatcttcgttcgtttttgcagtatcttttaaaataatctcaaccggtgtttcggctgcacgtttttcttttgcagttaaaatagcgtttgcctgattttcttttgtgtagacgatcagctcgctgtgattgtctatggaaatattgattttctgtctggataaagcagccattaactggtcgatcacaattgcaaatccgattgaggctgaagtttttccatagtaggttaaaagcttgtcataacgtccaccctttacgatcggttcaccgcttccgaacgtatatccggaaaaaataataccggtataatactgatagctgctgataatgccaagctcaaaggaaatatacttgttgattccataaacttcaagtactttatgaagttcttcaaggttatggatcgcagctaaaatccttggataagaagcagccagttcttttgcacgtttcagatcgttcaagtcgatatttaaacttccaagcatatggaaaagttcgttcagttcggactttaagttcagtgtttcagcgaactcctccacaccgaaaaagtttttgttggcaagcagttctctaagttcttcctcgtcctcctcgctgattcctgcagcctccacaagtccctgaaagaagtcggcatgaccaacgcttaactggaactcttttaatccggcttttttcaggcattccacaaccatggataaaatctctgcatctgcgtccacagtactgtctccgatcagctctgctccaagctgtgtgctttcttttaatctgccctgataactgctgttgttgatgaatgtatttcccatgtagcagaggcgtatcggcatatcctcatccataaaatactttgccgctgccctcgcaatggacggtgtcatatccggtcttaagacgagggtatttccctctctgtcaaaaaacttatataattccttcgaaggtgtggttccaatctcttttccgaaaatatcaaaaaattcaaaggtcggcgtctggatcggatgatagccataaccttttaatatgcgaagtaaatcagactggagaacaagctttttctcacattcctcgttgtaaatgtcacgcacaccctccggtgtatgtaataactgttttttcataatgaatctaatgcctttccctttacgttaacctgatgtttcaaagctgcgtaccttaaattatattctataaacactttagtatgctaatgtggtagcaaatgaaactatttggtttattatatgagaagaagatatacttgtcaatccctcattgccaaatctttttgcatcgtatcaagatacggaacaagcacgcctctgctctttggaagaaaaaattccggttccaattcttcatagcgaaagcttttcctgccgccctctttcgcacggttccagaattccaataattttacaagacgcagataataaaattcatcccgcgcggtatagcttaacaaaaaaaatgcaatgccaccctgcttttcaaaattctccataaaaacgacctgatgttcatggatgttctgaagcggaaaggtatctgtattacactcttttgcatcaaaacagaccggaattccctgcacggcaccgatataatcaacggtacttttctggtcaaaataagctaacgtgatgtgtctcgtttctttatctatattgattggagtaatcggggttggtactttctgaatcagcgccagcccgttctctaaatatttttcattggtgcggttgataaattcctctaaggtggaaccccttaatccgcgtgaattccaggttgccattattatttcctgccttatttttatatgcaatttgattataccataatatccgtactaataataaatttttatgaaatattcaaatccaatttgtaaaaaaagtggttgtatgttatgataatttcatacatatttatcaatcatcacagattgacaagtatagattcttttgggaggtatttttatggtaatgaatgaatcagttgagaattatctcgaaaccattcttgtattaaatcatagattgggaaatgttcgttccattgatattgcaaatgagatgaattttaaaaaacccagcgtcagtgtcgcgatgaaaaatcttcgggagaacggatttatcacggtaagcccggaaggatatatccaccttactgagtccggacgtgaagtggctgagaagatttatgaacgtcataccactctttcaagctggcttgtgatgctcggagttgatccccgtgttgctgcggaggatgcatgtaagatcgaacatgatgtcagtgcggaaagctttgaggcaattaagcgccatattaacagtgtttcaaaataatacgatttgccagacagtccttctgaggttattcaggaggactttttgcgttccgggataaaacaaaaacagagctctttcgtttctactcaggaacaaagctacattttctgatattctttttcttgcattaataaaacatcccaaattaccgatatatcctataaatcatcggggaggatttttatatgcaaattactctgaatcaactgacaggaaaaacaatcttttcttcacaggcaaaaaacacttcatctgacaacaccggaattttacaatatatggaggcagtcacaaaaaacaccaatgatgcagccgccgaggaaaaaaagcagcagaaattacagcatattatgaataaattaaagcatgggaaaaaactgacggcacaggaaatggaatttttgaagatgaattacccggatgcctatcagcgtgcgctccgtgttcagaaaatggctgaaatgttagaaaaccagttaaaacatgcaaagtccaagcaggaagcaaacggatatattgccgcggctatcggcggtgtttctgatgatgatccggacaaagaatatttagttgctgcctataatgagatttccaaggaatttcatcattcttctgcttatcacaggctcccggatacgatagaggatgcaaagaaacagcgcaaaagttccggagatagcggatttgaacggaatacagaggacgaaaacgattccaatgaggatctgatgcagtggacgccgcttcaggaaatcattgatgcagctccaactttagaattaaaaggctgatgtccggcgaaccaccgaaacatcagcttaacgttaacagaaacctgtctgtatatagtcccacgcgtcttcaaattccctgccggaaggcgcgatcacttctcttttgtcctcaaatacaatgcggtatgcatgaagcagttgagaacgaacatgaacctctttgcggaaacgttcatttgtttttaaatcaccgtattttccgtcaccgacgatcggatgcccaatagaggaaagatgcgcacggatctggtgggaacgtccggtgatcagatgaacctctaattctgtaaatccatttgcaaccgcaaccgggcggtactctgtctcaatcggaagataatctgctttctgctccggacgaatatgggaaacaacagttactttgtttttctgttcgtctttggaaagataacctttcaaatgtgttctctcacgcagttctccttttacaatacaacggtaatacttctgaacagtacgtgtcttaagagccgttgacatggtctgaagtccctttagcgtctttcctgcgatcagaagacctgaggtgttacggtctaaacggttacagatcgaaggtttaaaggtttttaactgttcctcactgagcgttcccttctggatcagataggaaagaatatactcatttgcagaaatatcttccgggactgccttctgggataacatgccggaaggtttattgatgatgatcacgtcagcatcttcataaacgacctgaagtctgcttgaatcaattgactttaacttcaggtactctgaatttgcctgaacattactcgaaaatttgtcaaaggtctcgtctgacaaaaataatttgacaagatcgcctgtgtttaatttttcggttccgtctgccttatgatcatttaaagttatatttttcttgcgcagcatcttgtatacaaaactgccggatgcattgctcaataatttttttaaatatttgtcaaaacgctgcccggattcattcggactgatcgtaaactgtttcataaactgaatgctctttcttaagaatgttttcttacacttttatttgcgctgctactgttttttctgccggatgttccggttttggctgtggttttgccggaagcctttttattatgcacattccggattgttttcttctttccctgcttttgctcgttcttacgattctcactgcctgatcttccgtcaaaatatctgcctggaccacttccgttcttgcgctcgccatgatttttatattcgccctgccgtggacggatcaggcatttcttatcaaacccgatgaggtctgttcttccggctttcacaagtgcctcatagacgagatcgtaatttttcggattgcggtactggataagtgcacgctgcattgctttctcatgagggttgattgcaacataaatcggctgcatgtttctagggtcaactccggtataatacatacaggtagagatcgtcgaaggtgtcggataaaaatcctgtacctgctccggcatatagccaagatcccttaaaaactctgcaagttcaactgcctcttttaaagtggaacccgggtgtgaggacatcagatacggaacaagatactgcttctttccaatcttttcgttcatgtccttgtaagcttttacaaagcggttgtaaacatccacactcggttttcccattttttctaaaacagcatccgagatgtgttccggagcaacctttaactgtccgctgacgtgatgttcgcataattcgcgtaaaaatgtgcggtcattatcataaatcagatagtcaaaccggattccggaacggataaaaacttttttcacattcggaagttcccggagttttcggagtaatttcaaatagtcagaatgatcgactttcagattctggcatggtttcgggaaaaggcactgtttgtgcggacaggctccctttgtcatctgcttgtcacatgcaggcgcacggaaattggcagtcggaccgccaacatcatgaatatatcccttaaagtccggctcccagatgatcttatttgcctctgctaaaatagactcgtggcttctggtctgaatgattcttccctgatgaaacgtcagggcacagaaactacagccgccgtaacagccgcggttgctgatcagagagaattttacttcctcgattgccggaacgccgcctaattccttataagacggatgataatctctcatataaggaagggcgtatacagaatccatttcagactgtgtcagaggttttgccggaggattctgcaccacaaataatttttcatcataagtctcaaataagcgttttccggaaaaaggatcggtattgctgtactggatgtaaaaactttttgcatattccagcttgtccgcctttaacgcttcaaaatgcggcagttcgatcgcatcataaatgctctctctgtctctggtcttgtaaacggttccgtcaataaatgtaatatctttgatatcaagtccgctgtctaaggcgtctgcgatctcaacgatactgtgctctcccattccataggaaatcaggtcagcaccggaatctaacagaatggaacgctttaatttatttgaccagtaatcataatgtgcaagacgtcttaagcttgcctcgattccaccaatgatgatcggtttgtgtttgtaagtctggcggatcagattgcagtaaacgatcgttgcgtaatccggtctttttcccatgattccacccggtgtaaaggcgtcggtcgttctgcgcttcttggaaacggaataatgattgaccatagaatccatgtttccggcagaaactaaaaatccaagacgcggctcacctaaccggttaatggattctttgtctttccaatccggctgtgcgataattcctactttatatccatgtgcctctaaaatacgtgaaatgattgcatgtccgaaggacggatgatcgacataagcatctccacagatgtatacaaaatcaagctgttctatgccagcttctttcatatcctctttgctgattggtaaaaatccatgactcatttgtgcttaacctttctatctaaaaacttacttttcgctaaattgataacttatgtagtataacttatttatctgcggttttcaatgccgcaatctcctgcgctgttaacggacggtactctcccggttttaaatcgtctggaagctgcaatggtcccatggaaatacgttttaaatataatacctttttcccaacggcttcaaacatccgtttgacctgatgaaacttgccttccgtgattgttaactcaatttttgatgttggtttactttctaaaacacgcaatttggcaggttttgtcagcttttcctctccaatgtcaacacccttttcaaaaaggttaacatcttcttcggcaaccattccgtcgatcacggcataataagtttttgccacatgctttgacggacttaacagatcgtgtgccaatgcgccgtcgtttgtgatcagaagcagcccttccgtgtcaatgtcaagtcttccgaccggaaaaagatccgagcggacagtgtccgtcagatagtccatgactgttttatggagattgtcctcggttgcagtcacacatcctgccggtttatgaaacagatagtattcgtattcgcagtaagcgataacttctcccttatagcagatctgatcggtttgtggttcgacttttgtttctggttttgtgacaatttccccgtttacggtaacctgttttgatttcaagagtttttttacttctgtgcgggtgccaagccccatttctgtcaaaaatttatctaagcgcatcctatattcctatatctttcttattattgtatctattcagagccaaggcaattttcataatttgcgaatgaggtgctatttaaataacgaagcagtggaaaaggatttacactgaactcattcccggattcatcattaaagtatatgccaaaatgcagatgcaccgggaaattgcctgtcgtgccttctatatcactgtatccggtatcgcccataaatccgagcagtgtcccggcttttacttcttctccaatctgaaagtcctttgcatagtctgaaagatgtgcataataaaaataaacatcatgttcactgcggattccaatgcggtaaccaccgaggcgaagccagccgatgttctctacaaaaccgtcagagacactgtaaaccggataaataccacgttcatttaaggatgccataatatcacagccctcatgaaagcggtcgcctccaaatgttctgctctgcctccatgaatttgtaaaatccacggtcgcttccggcttattttcgatagttccgaccggaaaaagaactgcatccgtccacatagcctcaattttactctggatcgactcaaatttttcaggctggtgttcctttacaaaagcaatattctgatctaacagctctgtatccgtgcaggtgtggtcgagtgcaaagtacatggcaaggtattcactaaacttggcaatatcaacatcataaatggcttccttaccggattggttatctatatctgtctgacctttttcctcccgtggatgattttcagtggcatataaaaagccattcagcacatcttcttctatttcttcatcccggaaattctcaaaggctgtctcatatggaaaacaatttatcttaagcagctcactgtcaatgtaaattccaagatatacattgatcagaacgatcagtataaaaagtaacagataacgaagaaatttctggtgcaccaaaatcatatccccactatttcataataaatgtcacggaagttacaaataaattacattttttgtaattcaaaacaatatattttactatgaaaaagaaacttatatgctttgcaattcttattttaacaggatacatcctgctttatccagcagacgctgtgagtgcatccagaaatggacttgtgctctggtatgaaaaaatactccctacccttctgccttttgcgattatttccaacgtcctgatccattcaggctacatggatgcactgacaaaacgttttgaaaagatcttccgtctgtttctgccaatcagcggagagggaatttttatcctgtgcaccggatttttattcgggtttcctatgggaagcaaaaactgcgccgaacttttaaaagcagataaaatcaatccaaaagaagcagaaatcctattttataccaccaataatatcagtccggtgtttatcggaagttatatcctgttgcagcagttacagctatccggtatgtttggaatcagccttctgatcttatatggcccggcactgtttctttgcatgattctctttccaaaagagcatgtaaaaaatgggcatgaaaaatcggcatccagatcacaaatgaactttaagatcatagatgccgccattatgaacggttttgaaacactcatcaggattggcggatatattatgcttttttccattttgatctcaatcgtggaaaatctgccaattccaaagcctgcagcacttttgcttgaaaactgtctggaaatcaccaacggaatcaactgccttgctgatacagacttaactatccgtatcaaatatatcgtggcaatgacttccacagcctttggtggattcagcggtatcgcacagacctcttccatgatcagaggaacggctctttccatgaaaaaatactgtctgatgaaactgcttctctctttatgtaccctgatactgtccgtttttgtcagtatgttattattttaacatatccggagaaatgtcaatctttggcagattctcggtattatcggaaacggtatcttctgcagttggatttaattctgcgcggttggaagatacaacgtcataaaattcctgcagggaggacatataattgtcatgtcttgcctttgcagaatccattgcatgggaaatcgaagtctcaagatttcttaaaatgtcatctgtgtactgcatagcacccatacggatattatttgcatcattcgttgcgttatctaaaatctcctgtgcctgcttggttgcgatcataacgacttcattagcctgcgcatatgcctgttgcatgatctgatgctcacttacaagttcatctgtcttcacctgcgctttggcaatgatcgcatctgcttttgcctgtgcatctgctaaaattgcttccttattgctgatgatcttctgataacgtttgatttcttccggtgttttggaacgaagctcactcaaaagttcttctaattcgtctttgtttacaatgatttttgaagaagataatgcctgatatttacagccgtcgatatattcttcaatttcttcgataatctgttcgattctgcttgccattggaaacactccttattttgatatgttatattttgcataaattctgtcaataaactgtgcaggaacaaacttggagatatcgcctccataagacgcaaactccttcacgatcgtggaacttaaataggaatactgaagacttgtcgttaaaaaaatggtctccacttccggattctccacatggttcgtctgtgcgatctgtaattcatactcaaaatcagtcactgcacgcagaccacgcacgatgatcgttgcattgatctgtttcatatgttctaccaaaagtccgtcaaaggatgtgacagacacatttggaagatcttttgtcatctctttaatcatactaacacgttcatccagagaaaacaatgagttttttgcactgttattcaagactccgaccactagttcatcaacaatgttggatgctctttttataatatcaatatgtcctaaggtcagcgggtcaaagctgcccggataaattgcttttttcataatgtatctgcctttccagactgcggatcataactttgttaaaattatgacacttttttattctgcttttgtaataaaagcgtgaacatttgtcttatatgtttttaactttttcaattcgaagccaagatcacttaaatagtcaaaggaagtatctaaggatgcctctacaacgatcagcgtatcttcttttaaaatggaagaatccttcaaacattccaaaacttccttttcatactcgtgattgtatggcgggtccataaaaattacatcaaacttatactttccttccatgcttcgaatggcggaaataacatcactctgaagaagttttgtttccttgtcaaacttcgtaaaatgaatgttgtcttcaatacaggcacatgcttttttgttattttccacgaaaacggcatatcttgcgccacggctgactgcttctaatccaatctgcccgcttccggcaaacagatccaggaaataagatcccggcacatcattctggagcatattaaacaaagtctccttgatacggtcagtggttggtcttgtatccatgccctcgatcgttttcaaaggaaggcttctggcggtaccagctataattctcatattttttctccttatttcagaaaataaattcctgcgttattgttttagttctgctcttttaaaacatctttgttctttacaatgtaatcgatcagagaaacaacggtaagaatcagtgccacataagtaaggatcgtgcctaaaatctggaagaatggcatctggatatctaaaataagtacaatgaccataagcatctggaaagtagtcttaaatttgccccagtagcttgcagcgatgacaacaccgttgtcagatgcgatcagacgaaaaccgctgatgataaactctctggcaataatgatcacaacaatccatgcagccagttgtccggtctgaatcagacagatcattgcagagcatactaacagcttgtctgccagcgggtccatgaactttccaaagtttgtgacaaggttgtattttctggcaattttgccgtcaagaagatcggtaaggcttgccacgataaaaatagcaactgcgatgtaattgttaacaccggtcatatttggtgcaagcataaaaaatacaaaaaatggaattaagatcacacgaaacgtggttaatttgttaggtaaattcataatcattccttctttctgaaatctagtcgcagatttctccaattaaatcatactcataagcgcctgtgacttttacttttacgatatcaccggtcatcagtgtttcatcggtattgataaagatatagccgtcaatatccggagcgtcacggtaagttcttccgacataggcattgtcggtatctacctgtccttcaatgaaaacatagagctctctgcccttcatctcttcatttttatcaaagatcacttcctcctgaagttccatgacatctgcctgccagtccttcttcagttcttcatccacctgatcttcgaaggcagcagccggagttccctcttccggtgagtaggtgaatgcacctaagcggtcaaactccatgtcattgataaactgcatgagttcctcgtgaatctcctgtgtctcacccggaaaaccgcagatcaacgtagttctcaatgttatatccgggatacgatttcttaaatgtgtgatgatgcgaatcagatcgtcatgacttgttctccgccccatgcgctttaacattgtgtcattcgaatgctggatcgggatatcaagataatgacagactttctcgttgcggatcatagaatcaattaagtcttcatagatctcttctggataacagtacataatgcggatccagaacagtcccggaatcttatttaactcgtctaataacttatgcagagatttttctccgtaaagatcaattccgtaaagggttgtttcctgtgcaacaagaatcagttctttggctccgtttgccacgagatcttttgcctgttcgatcagatcttccattagtacactgcggtaattaccacggatatatggaatgatacaataggtacagcgtttgttgcagccttccgcgatctttaaataggcaaaatgtccgcctgttgtgacagtccgttttgtatgaatggacggaagtccttctaaagtcttgaaattctcatagaatgtgccacctaatgcttcatgcactgcatttacgatatcttcataagaattggttccgagaattgcatctacttccggaatctctgtcttgatctcatctttgtagcgctgtgcaaggcatccggttacaatgagtgcttttaatggtccggtctttttgtattccgccatttctaaaatggtgttaacactctcttcctttgcatcgttgatgaaacagcaggtattgatgataatgatatctgcctcggtttcatcattcgtaatctcgattccgtcatcacggagcatgccaagcataaattctgtatctactaagtttttgtcgcatccgagggatacaaataataatttcattcgattctctctttctttcttaatctaacactgccataaatagcaaatatcctctgtcaggtgcacatggcaaaagggctgtcgcacaattgcgttcaaaagtgcggcagccctgacgggttctttttaatcctcgtcttctgtatcaggaataatctttaccttgccttcgtaaagttcctctacagcgatggataatggcttcggacatgtgaccttatctgccattggttcgtctccggcaatgatctggcgtgctctctttgcagcagcgatcacgagggagtaacggctgttaacaactggttcctcaccgaattccgtattgttatttactactttcattaattcaacataggatggatgtatcatattattacctctcttctgccttacggctgattcattttcatttattttttatcaaagatatctgatttccgatatctaatgtaagcttttttcgatgtttttgcaaacattatttaatctttttgggaaaaagctgtaagctggtgtctcatatcataaattgctgacagatttctggaaacgcggaaatgttcattgcgtataatggaatgaacttcctccacacagtcatcaagtttatcgttgacgatcagataatcgtatgcctcaattccctgtgcctcttcgaccgctctcgaaagtcttgattcgataacgctcatctcctctgttcctcttccgacaaggcggttctttaattcctctgcgcttggcggtgtgacaaacattaacagtgtatccgggaacttctcttttactttcaaagcgccctggatctcaatctccaaaataacatctttaccagctaaaagctgttcttctacatatgccttcggtgttccgtagtagttgtctacatactttgcatactcgatcagttcttctttctcgatcatttcttcgaactgctcttttgttttgaaaaaatattccactccgtccgtctcacccggtcttggagaacgtgtcgttgccgagatcgataacgcatactgcgagtcatattttttcatcagttctttcataatggttccttttccagaaccggaaaagccggaaagtacaattaaaattcccttactcttttgtatcatagtcaccctccgagacattgccattaaaccggccggcaagcgtctccggctgcaatgccgacaatattattttattattttctgtaaaaatcacgcttttcgttcttcttccctgcgtcgcgtcaattaaagtctcctgctcttttccacgggagatcatgcgttttgccggtgcagagtccgaagagataatgctgacgatcttatcggtattgaccatattgccaaagccgatattcattaactttcccataaaataattcctattcgatattctggatctgttccctgactttttcgatatctgttttcagattaattccagtatcagaaatctccaggtcattcgctttggaaagaatggtgtttgcctcacggttcatctcctgtgcgatgaagtctaacttacgtccgatgcttccaccagcctcaagtgcatctttggttgctttaatgtggcttcttaagcgcactgtttcctcatccacacagatcttatctgcaaaaatagtaacctctgtggcaattctcgcatcatcgatctgtttgtcttccaacagttctttcaccttattctcaaggcgttctctgtagtccttcataatgacaggagaacgctcctcgataaaatcaacatatgtcagcatgttgtcaagcttcgcacagagatcattcttcaaatgctcaccttctttgatacggctcgctacaaactgttctgccgcaccgcggagtgctttttcaagtcctgcccaaagctcgttttcgtctgtctccacctgctccattgtgaaaacatccggataccttgataatgtgctgactctgatatcattttcaagtccgaacttttctgccattgcagttaaatgttttaagtattcacctgctaattcctcgttgtatttcaaactgaaattgtcttctgaaaagtcctcaaatgtgatataaagatcgaccttgccacgctccatatattctttcagcagattacggatcgtgctctcaaaaaaattcaacgctttcggcatcttgatattcacatccaggtaacgatgattcacagatttcatctcaaccgtatacttacggtttccttcggtcacttcgcagcggccaaatccggtcatgcttttaatcataaataaccatgcctttctcatgctgctcaaaagagcagacatacattcgtcctgtctcgcatcactttcctattatcctgtatgcatagactaatttattataaagcgaaagttggtactcgtcaatatttttcgctcattgaggttggtattttaaatattttttggattcttaagacatactagagacaactgattcgaaactgcttatttattttaagaccggatcagaaacatataaaaaatcaggagggatttactatgtccgaaaacgataccataaagctgttaagggaatgtaattccggtatccaaatggctgttttttccattgacgagattcttgaaaaggtaactgacgggaatttgtacgacttactggaaaaatcgaaagaaaagcatgaggaactgggcgataaaacgcatgctctgcttgccgaatacggtgatgaaacaaaagaaccgaatctgattgcaaaaggaatgtcctggatgaaaaccaacgccaaagtcatgatagatgaaagtgacgaaacgattgcagacctcattgtagacggctgcaatatgggaatcaaatcactctgccgttatgaaaaccagtacgccggggctgatgaaaaatccaaagatcttacagattccattatccggctggaagaaaaactacggcaggatctgagggaatatttataacgaatgttccgtctgtttttcgcctgtttatagtgtgaaaactatttcaaaaatattgcacagatctgcctgttatcaagctgacctgtgcaatgaaaataatctgaacgtttttttatttgtcaaattgatttttgcattctatgcttctacaagtgattccatctctttgatgatctcgccaaaagcatttagtgcatcctggattggagccggtgtttccagattgacacctgcgatcttgagcagttccaccggagccatagagcagccgccgcgaagaaattctttatagcgttccactgccggtgcgccctcttctaaaatcttatgcgccacagaaaatgctgcacaatagcttgtcgcatactgataaacatagaaattgtaataaaaatgtgggattcttgcccattcatatgcaatctgttcatcagaaacaatatcagagccatagtattttttgtttaattccagatacgtgctgcttaaactgtctgctgtgaggctttcaccatcctcatacattttattggtgagcatctcatattctgcaaactgtgtctgacggtaaacagtccccttgaagctgtcaagataatggttcaaaaggtatgcacgctcttttttgtcggttgtattcttcaacagatattccattaaaagaatctcattgcaggtggaagccacctctgccacgaaaattttatacccggcataaatgtacggctgtgcctcgttggaataattcgaatgcatggcatgtcccatttcgtgtgccaatgtgaacatgtcatccaaagttccgttgtaatttaaaagtacatacggatgacagccataagccccggcagaataagctccgcttctctttccctgattctcgtaaacatcgatccagcggttttcgaagccttcttttactttattgacatagtcctcgcccaaaggtgcaagtgcctttaatacggtttcttttgcttcttcaaacggaattttctttgtcatatccggaatcattggcgtataaatatcgtacatatgcatttcgtctaagccaaggcattcttttcgtaacgcaacatatgcatgcattttatctaagtttttattcacagtgtcgatcagattgtaataaacacttggggaaacattgttttcatccactgcggcttctaacgaagaagcatactttcttgcttttgcatggaaattctgctgtttgatattgccgctgtaaaggcttgcaagtgtatttaagtactgtttgtatgtctgatacatcttttcaaacgcatcttttctgacacgtctgtctgcacactgcataaactggccataacggccgtgtgtgatgcgggctttctcgccgttctcatcttcaatttccgggaaaataaaatctgcattgttcaaaatagaaaaggtgtctgccggtgtctggctcatttcagccgtcatggcgagcagtttttccatttctgctgaaaggcagtgctcttttaagcggcggatctctgctaactgtttccggtacagctctaattccggttttgcttttaagaaaccttctaatgtctcctcggaagctgcaagtatctccgggtcaacaaacgctgttttgcttcccatatctgcatacagggaataaactctggaattcattgcctgatgttctgtatttgtctgatcctcgtcaaaaagacgctcggaatagttgaacgccttttcaatcttctctcctgctgttgccattgtttctaatacagccaaaagattgtctgcattttcggctgcttttccctcgaaagcggctgccttgtctacgagtgcggaaatctcctttaattcattctcccacgccccggtgttttcgtacatatcacttgttttccaggtatcttcctctcttacttcacttcgtttcaataattctgatgccataatgattttcctctttcctgtttttacaataatttgtgtattgcaagatccgatgaaatacacactgttaagtattttagcataaaagaatcatatacaacaagttaaaaatccattgtaccattgtcttttattgtgaaaagggcagcaaaccattattggttcaccgccctgtcttctaatcatgtctgcaatattaaagaaatgattctcccttttaggaatagtgttcccattacttaaaactctaagtaaaatgcatatttacacatgggtttattgaatctgaacttacctaacggttattcaaactggaagtgttctgcttagtttggcaactcgctttcttcaacgggaactgcctctaagtcagtgttgctccaataagagctaatatctgcacttgtaaagtattcaaaattatctgtggaagatttcagactgcctttctttactccatcgcagccataaatcagttcataacttgttccatcagaaaggttaaatctgaaactggttatctctgccccagcggtttcctctacctctttgagttccaaggatagcccctcaaacatatcatacaagttctttatggtttcttcggcaacaatgaccttcttttctgctgacacaggtactccaacaaagtgatacatttctatattttcaacatcacctacctcaaaagggaaatcaatattgattgtcttgttgttgcacccaaccaagccaagcacacaaaccactgctaaaactaatgctatcaactttttcatacaatcaacctccttcgtcaaatttctgatttttccttttaaaaactagaagttatcgaagagcatcccctaattgcagcaagccactacgaatgctttctcctgctccaccaatagcctgcgctataatgattgcagcaactataattgccactgcgacaataatctttccaatcaaatgttgatattctttcattttgattacctccatctacaagtatcgatttttatatttgattataaaatagatgtctgctgtttgcaatgtatatttataagctcatttcccataggtacacaattccgaaaagggagtaaattttctccattgtttcatcaaaaaagggtaacagattcacactacatatatatgaattctgttacccctactataatcattttttatgattttacaatttaattagtcctcatatccgtttggattgtttttctgccatctccaggaatccgcacacatatcttcgataccatactgtgcttcccagccaagctcctcttttgcttttgtcggatcacagtagcaggttgcgatatcgcccgggcgtcttggtttgatgacgtatggaatcttaacgccagtggctttctcaaagttctttacaatgtcgagaacgctgtagccatgtccggttccaaggttgtaaatgcaaagtcctgcattctcctgaattttctttaatgcttttacatgaccgatggcaaggtcaaccacatggatgtaatctcttacaccagttccgtccggagtatcgtagtcatttccgaatacaccaagttcttttaatttaccgacagcaacctgtgttacatatggcattaagttgttcggaataccatttgggttttctcccatagttccactcttatgagctccgatcggattgaaataacggagtaaaatgacattccattccggatccgctttctggatatctgttaaaatctgctctaacatagattttgtccagccgtatggattggtgcactgtcccttcgggcagttctctgtgatcgggatctctgccggatcaccgtataccgttgcagaggatgagaaaataatgttcttgcatccatgctgtctcatcacatcaaccaatgtcaaagtgcctgcaatattgttattgtaatattcccaaggttttgcaacagactctcctactgcttttaaacctgcgaagttaatgcagctgtcaatctgttcattctcaaaaattttatttaagatatctctgtctaaaatatctcctttatagaattttacatcttttcctgtgattgcttttactctgtctaaagatttctcagatgagttgcttaagttatctaatactactacgtcatatcctgcgttctgtaattctacacatgtgtggcttccgatatatccggcgcctcctgtaactaaaattgccataataatcctccttgttttttctccttattttgcgaagcttcattaacctttcctatggatacatattaacgcacccggcagaaattgtatagactaaaatgtgtaaattatatgtaaaaatgttgcatgttcatttcacgctttatataatacatataaatacaacatcttatggtacagaaaatatctttttattttatgaataaatatttacgattgtcataattttcatcttactgcagggaggtaaatttttttatgaatcaaaattataaaaattcctacaaagtgaccgagaaggaacttgtatcgctgtctgtctacaatgtaggattccaaaaatgcgatccgctctatcagtggggacccggaatccgcgatcattatctgattcattatatcatttccggaaagggatattataaaatcaaaaatacaactttcacgctgcaggcaggagattcttttctcgtctatccgaacacggaagtattgtattttgcggatgaaaccaatccgtgggagtatgcatgggttggttttaccggaagtgatgcctcgatgattttaaaggcaacggatttttcgacagaaagacctgttatcgaacacacaccactgggcggatccattcacaggcagattctccatatttatgatgccagaggaaatgagttcgaacacgccgtggaaatgaccggccgtctctataccatgcttgcactcttcatgcatggagcaacgacaaacacaacgcaaaactctgctaacagctatgtacaaaaggggattgaatatatttcttccaattattcttaccatatcacggtggaggatatttccgcctatgtaggactgagccgaagccagttattccgctcctttgaatccgtgcttggacagtctccaaaggaatatctcacagactttcgtatgaaacaggcgtgctatcttctggaacactcggatctctctgttacggcgattgcaaattcaatcgggtttgacaatggactttatttttcgaaaacttttcataagatgaaggagatgtcaccgtcggagtttcgggctatgcataagcagaacatttcatagataacatctatttttcgacacaaaaaaataacgcccacagtctggtaaactaaggcgttatccttttaacacatatttaccgacggctaagtgtcactagccgtcggttctcttgctaataattcttattaagctactgccttcttagctacttctgcaagtgctgcaaatccagctgcatcattaacagccatctctgctaacatcttacggttgatatcgataccggaaatttttaatccgtgcatcatctggctgtaagagattccgttcattcttgctgctgcgttgatacgagcgatccataactgacggaactgtctctttctttcttttctaccagcataagaacttgttaaggctctcataactgactgttttgctactctatactgtttagatctagcgcctctgtaaccttttgctaattttaaagttctattatgtctttttttagcgcctaaaccgccttttactcttgccattttttaatcctccttacttaattcctatgcgtatggtaaaatcttcttcatattcttaacgtttgttgcatcaaccattgcaggttttctaagatttctcttattctttgttgttttctttgttaagatatgtctcttataagctttacttctttttaattttcctgttcctgtaactttgaaacgttttgcagctgctctgcttgttttcatttttggcatgatagattcctccttaaaataattatttcttttctgccaacaccatgctgatacttcttccttcaacttttggtgctttttccactactgctgtgtcagataagctttctgcgaaatcgtcaagaatgtgtttgcttgcattcatatgagccatctcacgtccacggaatcttaaagtaatctttactttatctcccttggataaaaacttctttgcagcgttcattttggtattcagatcattcaaatcaatattcggtgacaagcgaatctcttttagctcaaccactttctgtttcttcttggcttctttttcttttcttgccagttcataacgatacttaccgtaatcgataatcttgcagacaggcggttttgcagttggagcgattttaactaagtcaagttctgcttcctcagcaagcttcatagcttctctagctgacataatgccaagctgttctccgttttctccaatcagacgaatttctttgtctctgatctgttcattaatcattaactcgctaatggtattgcacctccaaaataatttttcatgcttccacataaaaaaagtggataggcagactatccacaatcaatcaaatacgcatacgcgacgtttgaggtattaaaccatgagacactgtaaatttgtgctccggtgagagtggatactctactttgttttcaacaactctgatactataacatacaataacttgtttcgtcaagtgtatttttgaaacttttttaaataactatttgcaatccctcacctgatttagtacacttttataatattctatcattttttttgaatatcagcaaagtgcaaatgtagtgattataaaaaatacattcatagaaaaacatttacgaagaaaggcaaaaattatggatcaacgaatcatcgacttacacgtacactcaacagaatcagacggaactttcaccccgacagagttggtagacgaagccagacgtgccggactgtccgcttttgcactcaccgatcacgatacctgttctgggattgaaaaagcaatgccttatgccactacctccgggattgaactgattcccggcattgaactttccaccgactatcatggaaaagaagttcatatcgtaggtttatatattgatattgaaaatgaacagcttttgacaaaaacagccgagtaccggaaatgccgcagtgagcgcaatgcacttatggtggaggcactgcagaaagaaggtctttccataaccatggaagaactgatcgctgaaaatccggactgtgtcattacccgcgcgaacattgcacgctttctatatgaacatggtcagatcaaaagtgtccgcgaagccttcgaccgttatatcggcgatcactgcaaatgctatgtcggcagattgaaagtcacatccaccgatgccgtgcgtctcatcaaagaagccggaggtactgccattttagctcaccctctgctctatggtctgagcaacaccaatctccagaaaatgatcgacgagctgaaacctgcagggcttgacggattagaagcaatttactctacttacaccaccggggaagaacaacaaatgaaacgtcttgccagagaaaattatcttctcattagtggcggttcggattttcatggttcaaacaaaccggatattgcacttggcaagggacgcggacatctgtatattccgtattctgtacttgagtccattcaagcaaaacgaaaataatatgttgcatttcatctatacaacaaaagcacaactattcttctgttatctggaataagttgtgcctttgttcttttaattacaatataaacttctcaatcacttccgcgatcgcatcatggttgttatcattttccgtgacataatcagcggcttttttgatatcatcgatcccgttcttcatagcaatgccgatatgtgcggattggatcatcggtatgtcgttctgctcatctccgatcgcaacggtgcttgtatgtggaatatttaacaatttcaccagatactgtgccccggttcctttgtccgtgttaaccggacagtattctaaatactctttgcaggaaaagaaagaattgcatttgccttttgcccaggaagcatttgccttctgaaaccgtttcagctttccgtcatcttctaaccggatcaaaatgactttctgcggttcggaatccagacaatctgaaatcctttttgtaagtttgtaggacatatgggagcgttccacataataatcgagctcttttgtgtggcgctttgtcacaatgtcgaccgtattgtatgtctgggcataaataccagccttatgtgcgcggtcaaaaatctcctgtgccacctcgattggaagggaacttttatataacacacggtctgccgcacagtcatagatcacagctccgttaaatgcgatcatatagcatccaggacttgtcagtccaagatcctgtacgacgattctgcccgcttccaccggacgccctgttgccagaactaagtaatgtccctgctctaacattttttgaattgcagtccggtttctttctgaaatcgacttatcatcacataataatgtactgtctaggtctgcgaataaaattttattgttcataaccttcctccctcacaaaaacagttcttcttttgtaatgtttctattattctaccggttctgccggaataaatactctcccctgatatccgtgtgacggcttcggaacagccgcaattgcctctttacagaaaacatcctgtgaagataaggcaacttttccgcgtctgtcgactttctcataattgccgtcagcctgcagtacatgcgcttttaaggtgtcagccagctccacatccagaatatgtttgaccctttttttcaattcctcatccagtaccgggaacaggatctctacacggcggtctaagttacgcggcatccagtcggcactgcccatgtaaagttcttcctctccgtcattgaaaaagtagaagatccggctatgttccagaaagtttccgacaatggagcggacttcgatgttctcactcacacccggaattccaactttcaaacagcagattccacggacgatcagttgtatcttaactcctgccgcagaggcttcataaagggattcaatgattcccggatcgcagagcgaattcatttttgcaatgatttttgcaggttttccctctctcgcatgttttgtctcacggcagatcagtttcgtgaacttcgtgcgcagccagatcggtgcaactgcaagttcattccatgacagcggttcagaataaccggatagcatgttaaatacagccgtcgcgtcctctccgattgctccgtcgcaggtgaaaataccacagtctgtatataattttgcggtggaatcgttatagtttccggttccaaggtgcacataacggcggatgccgtcttcctccctgcgcacaaccaatgcgattttactgtgtgtttttaatccaaccagaccataaataacatgacagcctgcctgctctaattttttcgcccagacaatgttgttttcctcatcaaatcttgcttttaactcaactaaaacagaaacctgtttcccattctcagccgcctgcgcaagtgatgcgatgatcggtgaattgccgctgacacggtaaagtgtctgcttgattgcaagcacatcaggatctacggatgcctgacggataaagtcaacgaccggatcaaaggtctgatatggatgatgaagcaggatatcacccttccggatttcatcaaaaatattttcgcccggtatgatctctggtacacgctgcggtgtatacggttcatttctcagatcatcacagccctctaagccatacattttcatcaaaaaagtaagatcgatcggtccgttgatctggaaaatatcctgttctgctacttttaactcatcttttaagaaatttaaaagcttcttatcaataccgtcttccacttccagacggataacctcgccccactgacgcattttcaactgtttctgaatctcttttaacaggtctgcggcttcatcctcatcaatggaaaggtcggcatttcgcatgacacgataaggataggcgcaaagtacatcgtaatttaaaaatagtttatcaatattgcgttcaatgacctgctctaataagataaaagttttctcattgccattttccgaaggaatatgtacgagacgaggtaaaacactcggaacctgaacagttgcaaactcaatttcctctttgtcggtttttccttttttcttggaaagaagtgctgcgatattcaatgttttgttccggatcagtggaaatggtctggacgcatccactgccattggcgtaagcaccgggtacacgttatcctcaaaatagcggtcgacaaatgctgcctgtgtctcactcaaatcctcaaatgcatccattacgacaatgccgtgctggtgcatgagcggaaccagcgagcggttataggtattgtactgtaaggtgacaagctctcttgtacgctcattaattttctctaactgttcagacgccgtcattccagcgatgtcttttttcttataattggcatgcaccatatcctttagggaggcaacacgcaccataaaaaactcatccaggtttgacgatgtgatactgacaaattttaatctttctaacagcggaatggatttatccctcgcctcattaagcacacggtgattaaatttcagccagctcaattccctattctcgtaatattccggttttttaaaattctgttctttttccataagataaacctagcctttcccttggttgtctgtcagccgtagactctcttttctttaatgaccggctttatactgaatacattttcaaaatatgctgtcttggcatcaaacaaagctttttccaaagcaatatcatccattgtctcgatcgtgatcacaagttctcttcccttgaccgtcgccttgacattcttaaacttctgcttatggctgcggtccatggcattggaaacacgcaagattgcggagagcttcgcaacggtcagataactgtcatgatctaatttatccgcaagatcttcataatccgggagtgtccatgtgttatataaaaccgtattggcaatgatctcacgctctttgtgcgtcagtccgataatctcggaagccatgataatgtcataggaacaggacgggccgtttgcgaaactgatgtattttccacagtcatgcagaatagcggccacctgcaaaagcagacgctctctcctgccaagtccatgtacttttttcatagtgtcaaaaatgagagttgccatttgtgtcaatgcatcaatatgcggcgtataactcatataacgctcggagagatttcttgctgcagacaatacatccgcatcaaaatcatgctccacgcggatcatgttattcttctgtgcatagtggaatgcgataccatcgctgacattcgttcccggtgcccagaggctctctgcaccgatactttctgccatgcatttgaaaatcatcatatacggaatgacgagtgcatcactctcatttgaaagatttaattcttcggagatttcctctaatgtctttttatccagctccttaatgtactttaagaatttttcaacctcaatggtgttgtcttccttattcttctcaactttccggctgatctcagaaatataatcgccgatgatgatcagatatttgatcttcgtctcctgaaggtacattgccttaaaaacctcgagttctttgtcaaccagctcctctacctgaagttcatactgtgcaaggttattgctctttctggcaagctgctctctcatgcgcatcgtaccgagtgcaagatgctgtgttgtgacaacttttccctttgaaaagaccgtaatctgcattccgccgcccccggcatccacaacggctgcgcccttctggatcatgcgctcaaaatcctcacgcatggcaacggatttgtaactgataaaacgatgctccgagttacttaaaacgcttaccgtaagtcctgtccggatgcggatctgatctaagataaaaagttcattttccgcatttcgaagtgctgcggctgcataggcttcatagctgtctacgcggtagccgtccataatctttttgtattctgcaagtgtgttgcaaagtgcctccacaagttcatagccgatacttcccttggaataagcgtcctttccaagttcgatcctgcttcggatatagtcgatatcacggatttttttcttgcccgaaatctcaaatattttaatgcttacttcataagaaccgatataaattgctgcgaatgtatgaatcaccagatgtctgcctcctcatcttcctttgtatatctctattataccaattttttattcttttccaagtaaatagttgataaattgctgtgcagttctgccggataaaccaccgtgggaaagctcccatttatttgcctcggcaagcagagtctcctcatccatatgaacctgatatttttctgcgagaaccttcacgatattctggaattcttttttgcttggagcgccaaaataaatggaaacaccaaacctcgcatacagggaaagcttctcctgcacggtatctgaggtgtgcatatcctcacgcacttcctctttatcggaaaatgtttcacggatcagatgacgtctgtttgaagttgcatagattaagacattgtccggtttcttctccagtccgccctcgatcacagctttcagatatttatattcaatctcaaattcctcaaaagaaagatcatccatataaatgataaatttgtaattccggtttttaatctgtgcgatcacatcattcagatcacagaactggtgtttgtatacctcgatcagacgcagtcccctatcgtaatactggtttgcgattgccttgatactggttgattttccggttccggcatctccgtataacagacagttatttgcctgttttccattgacaaaagcttctgtgttgtcgatcagcttttgctttgcaagctcatagccgacaagatcctctaattttacatgtgcaatattggtgattggtacgatctccacatcctcattttctctgtgctggatacggaaagccttgtgaagtccgagttttccaactccgaaatctttgtaaaacgcggtgacagcatctttaaattcagaaacatttgaggaagcttccagctttaacttcaactcattgatgcgctccttgatcctcttgttaaaaatctttccgcttcctgtcatgctctggtaatcggtgatggcatcaatacagtccatttcaaaataggcagcaagcttttcaaagtcaaaatcaaaaagtgattttataatctcaaaatcatgcagtacgatctgattaatggagccttccacttcaccgcggatctcacaggctttgctgtaggcattctcattgttgactaaaataaatgccagaaagctatgccacagattcccctcgaagccatggcttaccgcaagttccattaactggttcaaactctcatacaaaagggattccacatcctctttgttgtaataatcgttctcataattttccatgatccaagtcatgttataaaataattttccattctcaaaatctttatataagatcaaattctttggacttttcatctgtttattcattcccttctgcgcttacatagtttccaagtattttcaaacggatcgtctcctccgtcagtccgcgcaatgcgttctgcaccgctgcgtcattcagatttccctcaatatcaacgaagaaacggtattcccatgcttttccctgcaccggtcttgactcaatcttattcatattgattccgttgtagataaaatgggataatttatggtacagcgaaccactctcatgcggaacttcaaacgaaatgctgattttatttgcgtttgattcaaatatcttcttgtttgccacaatgatgaactttgtataattatttttgttattctgaatggcttcatctaatactttcagcccataaatatctgcagtcagggtgcttgcgatcgctgccttgttcttttttccatcctctttgatcttctgggcagacattgccgtatttttcagactgtgcttttcccagtctctgtggctctcaaggtattttgagcactgcatcagcgcctgagggtgggaataaatgtcggtgatatcgtccatgtctgcttccggcagacctaaaagagcatggtcgatacggatgatctgctctccgacaatatagttattgtactcgaccataagatcataattttccgatacaattcctgcggaagaattttcgattggaaaaacagcataatctgcctctccattcttgattgcctccatggcatcccgccacgtatccacgtgatagctgtccgcattctctccaaaatactgctttaatgctagctgtgagtaagcgccctcggttccctgaaacacgattttggcattcttataatttaaatgctccacctctttaaaatctgtgccctccgtatgaccatgttctgtcaaaagctgatactggcgttttctgctcatagacatgatctgttcaaaaagttcccggataccatgctttaaaaaaggtgtcgctccctttctgcttaaggtttctaatttagaaacttcgcgctgtttatcaaatactttctttcctacagcaattttatattcagcaacttcctcagaaattgccattctgcgttcatacagatctacgatctgactgtcgatctgatcgatctcatctcttagttccaataaatctctcataaaaaatccaagcctttctctgcggtttttcataataaagtagtcttttaacatcatattacattcacggtccggttgcaagagaacacttgcgtcctggtatacagaaatgttatactttctatagataaaaaagtccttacgataggaatcaaagaggtgatttatttatgaaaaaaatttggaaatggctgctgtttgtgttggtgattcttcttgctgccgggtgtgtttttctctaccggtacatagaccgcattcggtataatgacggttatgtcaacggcaacactgcgggaaatctgtataacgaaggatatttctgtgaaaaagatggtattgtctactttgccaaccctgccgacaactactgtctgtactccatgaacccggacggcacaaacatcaaaaagttagaggatcagagtgtcagctacatcaacgtggatgaccactacatttattactgtaaacttaagggaaaaagtgctgattcattttccttcctcccgatcaataccaacagtttatgccggctggatattgacggaaagggaaagcctgaaattttagatgatgatccgtgtatgtatgcttccctggttggaaattatctgtactatctgcattatgataccactgatgcaaccacgctgtacaaagtcagaattgatggcaaggaaaaagagcaggtagaaaaacagtcctactttaccgcaagtaccgatggacaatatatttattataacggactgacagacaatcataatatctatgagatggacacttccaatgaccacgcaaaagtcatctatgaggggaactgctggatgccggtgaaagatggaaacaatctttattttatggactgtgaaaacgattaccgcattgccaaagtcgatctgacaaatggtgaaaaaacgctggtcacggactgccgtgtcgactgctacaacgttgccggagataagattttcttccagaaaaatgataagacagatccggccatctgctgtatcaatacagacggaagcaattatcaggaattaaaaaagggaaactacactgccattaatgtaacttccacatatgtctattttaaagattttacgaccaaaaccccttattatacatctgttgctgccccgggcaatgtacagattttcaatccgtaagcaggcgctgtcacaatgcaattttttacaaaaaagaaacgtcaggaaacttcattttttcctgacgtttctttatcccgcaaaacaaatatttatgcaaaatcaaataacgacaactgattggactccggcatatcgcccagcagtccaagatctgccataagatcaatggtagatttcgtcaccttggttctctggcggaaatcatctttggataagaattttccgtcttttgctgcctccgcaaccgcaattgcagcattgtcacccataccttcaatggtatttaacgccggcataagctttccgtcgatgatctggaaacgatccggcaatgcacggtaaatatcaattggcgtgaaatcaaagcctctcgcatacatctcctgcacaattcgcatatcacggtagacatcctgctcttttttggaaagagaatcttttcttctcgtgtaatctttataaaaatattccagacgctcttttccctgacacatgatctcataattgaaaccggtcgcacgaatcgaaaagtatgctgcataataagccagcggatagaatactttacagtatgcgatacgccatgccatcataacgtaagctgccgcatgcgctttcgggaacatgtatttgatcttcagacacgaatcaatataccattccggtacgttatgcgcccgcatttcctctttccactcgtcttttaatcccttaccttttcgaacagactccatgattgtaaacgactgctcactgtcaagtcccataccgatcagataaatcataatatcatcacgggtacagattgccgtagaaatcgttgcaattccctgttcgatcaatgtctgtgcgtttcctaaccacacatccgtaccatgcgaaagtcctgagattcggatcagatctgaaaactcttttggtttcgcatcaataaccatctgcatcgcaaaatccgttccaaattccgggattccaagacagccaagcgggatcccgttgatgtcttccggttcaactcccaatgcagaggtattcataaacagtgacatgacagtctgatcgtctaatgggattgtctgtggatcaagtcctgtcaggtcctgcagcatacggatcatggtcggatcatcgtgtccgagaatgtcaagctttaacaggttatggtcaatggaatggtaatcaaaatgtgttgtgaccgtcgcagttgtcatatcgtttgccggatgctgtaccggggtaaacgtattgatctcctctccaaccggaagtacaacgatgccccccggatgctgtccggttgtccggcgcacgccgacacatccctgtacgatacggtcaatctcacaatttcgtttgtggattccacgttcctcataatagtttttgatatatccaaatgcagtcttatccgcaagtgtaccgatcgttccggcacggaaggtctgaccgtagccgaaaataacttcacagtaggcatgcgccttactctgatactcaccggagaagtttaagtcaatatccggctctttatttcccttgaaaccaaggaaggtctcaaacgggatatcaaatccgtcttttacaagcttcttgccacacaccggacagatcttatccggcatatcacatccgcttcgtccggaaaaagcttttacctccggcgaatcaaaatcactgtatttgcagtattcacaccggtaatgtgcctgtaacgggttaacctctgtgataccggacatggtcgctgcaaaagaagatcctacagaaccacgcgaaccaaccagatacccgtcctcgttggatttccacaccagtttctgtgcaatgatatacataacggcatatccgttggaaataatggaatttaactcacggtcaagacgttcttttacgatcggcggaagttcctctccgtacatactgtgcgctttattataacagatatcacggagcatctgatccgagttttcaataaacggcggacatttatccggtcttaccggtgcgattttttcgcacatatcggcaatcttattcggattggtaatgacaacctcctccgcttttgcacttcccagatactcaaattctttcagcatctcctcggtcgtgcgcagatataacggagcctgttcgtctgcatccttaaatccttttccagccataataatacggcggtagatctcatcttccgggtcaagaaaatgaacgtcacaggtagcaactacaagtttgttaaattcttcaccaagtttacagattctgcggttgatgtcctgtaactcctcaatcgtattaaccggttccttgtcactgcgaagcataaattcgttattgccaagtggctgtatttccagataatcataaaacttgacaagccgtatgatctcctcctgtggtcttccaccgacgatcgcgcggtacagttctccagcctcacaggcagagcctaaaagaagtccctcccggtacttcacaaactcactcttaggcacacgcggtcttttgttatagtaagtgagatgtgaaagcgacacaagacgatataaattaatacgtccgatatcgtttgttgcaagaatgattgcatggtaggttggcattttcatgaccgtttccggtgatgtggaaaccatatggttgacatcatccagattctccatgccgcgctcttttaacatctcaatgaactttacaaaaatctctgcggtgcaggcggcatcatccacggcacggtgatgattttccagtgaaacattcagtgcctttgccactgtatcgagtttaaaacggttcagattcggcagcaggattctcgcaagtgccaccgtgtcaataatggtaaacgctctgtcaatcccctgatctttgcagttctttttaataaagctcatatcaaattctgcattgtgggcaaccatgatcgcaccctcgcagaacttcatgaattccggaagaatctcctcaatctttggtgcatcaatgaccatatcgtctttgatcgaagtcagttcctcaatccggaatgggataggcacttccgggttgacaaacgtggaaaaacgatccgtgatcgtaccaccgacaaccttaaccgctccgatctcaatgatcttattcttatccggactgaaacctgtcgtctcaaggtcgaatacaacataggtctcatctaagctctgccctttcgaatctgtgataatgtcttttaaatcatcaaccagataagcttccacaccgtagatcactttaaaatcatcatccgggtttaaggtgtggttagcatccgggaaagcctgcacatcaccgtggtctgtgatcgcaattgccttatgtccccactttatggcacgttttacgatatccttgcactcggatacaccgtccatatcgctcatttttgtgtgacagtggagttccacacgtttttccgggctcgtatccatacgtgtcgtcgtaaaatcagcaatttttttgattccgactatggaagcaatggtcaactcactgtcaaacttatcaatggtcgtcacacctctgatttttaagaaagcgccttttttcagattggcaagcagctcgtcccggtcatcatttctcgtaaaaatctttaatacgatcgaatccgtaaaatccgtcactgacataatgataatggtcttttcatttcggatttctctcgtctcaaccgtcatgacctgacagcggatcgtaacctcacccatctcgccgacgattttctccaatggaattgtttcaccatcttcaatatcacgtccatagatgacatccggattgtctgattttttgcctcctccgaagccaccgtcataacgttttttaaactctttccgaggaccgtcataaggtttttttgcagtatttcctgcaccgtttccagcttttgcatcactttttgcaggttttgcggcatttccactaactgtagaactacctgttccagatgttgtagtcttattcgaaactgcatttttttcagaagcatctgccgtgaccgcaactgtctcgccgtcctcgtctttcagattgatgttttttaagatgttttttatttcaaactgaatctggagatcactgtttttcttgtatttgctctcttttggttcctcaaaatcaagatccacaatcagatccattccgcagcgctcacacacgatcttttccaaaaattcaacgatctcatgggaacgtgtctgcgcaatgatcgtattctctaatgttaaatgcagatgactgtcatctgtaaattccattttggacgcgcggagcagattgtactccatcaggctgtaagcttttaattcctctaaaatgctgtccttatacatatccatcagcgtgcgggcggtatactgctccgaaagctggtatttttcaatgatgcggacattcatctttttgcccttaaaaatctgatcctcaatggatttttccaactgcgtgatattgtttttatgtatgagatgatttcccagaagatagacacggatatgatctctctcatgattcattcctaccttggttatttccatctctgataaaatttttttcatatctccagacacttccagtgtcggaaatacatcaaaaaaaagtttcgccatggatttactgttccttccagtgaagcagttcgtaacggagtgcatctaaaagttctgcctcaggcacttttttgaacacttcaccgtgtttgataatcagtccttctccaattcctccggcaattccaatatctgcctcttttgcctctcccgggccattcacgacacagcccataacagcgactttaatatccaatggaatgtctgcaaccatattctctacctgattggcaagttcgatcagattgatctgtgtacgtccacaggtcggacaggaaacaacttccacaccgcccttgcggagtccaagtgttcttaaaattaatttggcagatttgatctcctctaacggatcacctgtcagtgaaacacggatcgtatcaccaattccctgatgtaagatcagtccaagtccaattgcagacttgatattaccactgatgatcgtaccagcctctgtaattcctacatgcaatggatgatctgtctgggatgcaatcagttcatgcgcttttacacacatcataacatcggatgatttaatactgatcaccaagttatcatatcccatatcttcaatgagctttactttatcaagcgcactttccaccagcccttcagcagtcacaccgtgatatttttctacgagatctttttctaaagaaccactgtttacaccgacacggattgggatgttacgctcctttgccacatccacaaccgcttttacacgctctgcacttccgatgttgccaggattaatgcggatcttatcagcaccgttttccatagctgcgattgcaagacgataatcaaaatgaatatctgcaaccaccgggatctgtacctgttttttgatctcttttaacgctttggcagcctccatagtcggaactgcgcagcggataatatcacatccggcagccgcaagctggttgatctgtgctgcggttgcctctacattttccgtttttgtattcgtcatggactggattaagattggatttccgccaccaatcacacgattaccgatctgaaccgtttttgtcattattttttctcctctcaatgcattagatatgcaaccctatttatatacaaagtttcgcaatcatctaaacaaataattttcgaatatcattaaacataataaggatcatgagtgcgaacagaagcatgataccgacaaagtgcaccattccctctttctccgggtcaacttttttaccgcggattgcctcgacaatcagaaataccagtctgccgccgtctaacgccgggagtggcagaaggttcatgacaccaaggtttgcggagagcaggatgctgatataaagcatctgtaaaaacgcatagaaataaccatacgaaacactctgctcgtagctgtccccgattgcacttacaattccaaccggaccgctcatatcattcactgtcacgcctccggtaaagagtagctttaagcttccaagcgtcgtataaatccagtattccacctcataggcactgtattttgcaagggtaaatacattattggtcgtcttttctcttgctgccattccgataaatccgtacagataccttccagttgcctcatcatactttggcgtcagctctgttgtgtaacgctctccgtcacgctcataagtgaccagaaccggctctccggcatgatacatggagtaagcactcacttcacggtaaaaatgaatgtgtttgtttcccattttgacaatggtatcgcctccctgaagtcctgcttcctccgcagcataacccacgctcacatccgaaaggacaggaaggtcatatccggtacagcagacaagaataaaggaaaaaataaacgccataataaagttaaagattggtcctgccgctacaacactgatcctcgcccagacagatttgttgttaaacgctttattatcctgactttctgcgtcctctccctccatcatgcaggcgcctccaaatggaagcagcttgattgaatattttgtctcccccttctggatgccaaaaagagtaggtcctaatccaagtgaaaattcatttacacgaattccatttgctttggcaagtaaaaaatgtcccaattcatgaaacagaatgataatgctgaatataagtaatgcgataataattttcatgtaaaaaacctttcatgcagtcttgttaaattttgaagtgctttatcttgcactcatctttttttcaataaactcataagcagccgcttctgtccccaaaatctcatccacatccggatgtgcgataaactctgcattttccatacacgcttcaataaactctgtgatctctaaataagaaatcttccggtctaaaaacagactgactgctttctcatttgccgcattgtaagcggttggaatatttccgcccttttccatcgcctgatatgccagtgcgagtccccggaaagtgtcggtatctggcttttcaaacgtaaggtttgcaatctcaaaaagatctaaccgtttgccggataaatttctgcgctccggataatagagtgcatactggattggcaggcgcatatccggtgtgccgagctgcgcgatcactgctccgtcctgatattccactgcggaatgaatgacactctgcggatgtaccacaacctgaatctggtctaatgtcacatcaaagagccattttgcttccattacttccagacctttgttgacgagtgtggaggaatctatcgtaatctttcttcccatgctccaatttggatgctttagggcatcttctactcgaatatcttttaaattgtcgagttttcttccacggaacggtccgccggaagctgtcagcagtattttgctgatcttattatctcctgcgccctgtaatgactggaaaatggcactgtgctcactgtctaccggaaggattggtacatcatattcctttgcaagcgggataatgatatgtccggcagtcacaagagtttctttatttgccagtgcgattttctttctggctttaatggctgcaatagtaggtctgattcccagcattccgacaatcgctgtcactaaaatctcactttccggaatcaccgatacctcaagaagtccctccattccagatacgatcttgataccaagatctttcgtgttcgtccgaagttcagacgctttcttctcatcccatacactgactaacgctggatgaaactcacgcatctgcgcttctaataatttaatattgcttccggcagccattgcaacaatctgaatatctccctgttctctcacaatatccagtgtctgtgttccgattgatccggtggaacctaaaattgcaatttttttcatgttatgttgtcctcactttcgctcctgcttcgtgtacattataattttataaaattcactgccagaaaataaatgattggtgctgtaaaaatcacactgtcaaaccggtctaaaataccgccatgtcccggaatcagttttccataatctttgatctcgtaatttctcttgatagcagacgcggtaagatctccgaccatagaaatcaatgcaccaaccgcactgattcctgccatgatccatacatgtgtctgatcaatctgcatcgcatttttaaagatcatgccgtaaatgatcgtaagaagcgcagctcctacaacaccgccaactgcaccctctatggatttcttcgggcttaattttggtgacattttgtgttttccaatcaacattccaacgcaataggcgcaggtgtcacatccccaggaacaaaggaaaatgagccatacaatataagctcccgcctcgatcatacgtgtctggtacacatatgaaagcatcactgccacataaaagacaccaaaaaatgcagccagaacctgttctgtcttatatttcggataagtaaaaacataggcagacatcataagaatcaaaacgcccaacacaaataccatcgtatccggcagaaatgcaaatttcagattgcagtaatacagcgttgcgccgagataaccaatgattcccactgcctctttttcaatatggaaaatacgatataattcaaacattccaatataggaaatgatcagtgtggaaaccaataacacatccccacctgtaatgatcagaacaagtgcagcgatcactaacacaattccacttaataatcttgttttaaacattatttttctccatcctcttctgacagtgcaccaaacctgcggtcacgcttattatatgcttccactgccttttctaattcttctttatggaaatccggccacggaacttccgtaaaataaaattcactgtaagctaactgccataacagataattggataatctctgctcaccgctggtacggatcagaagatccgggtccggaatatctctggtatctaaatatgtttcaaaatgtgtctcatcaatctcctgttccgaaagccttccgtcacgcagatctgcatacatctttctcataccacggatcatctcatcacggcttccgtaattaatggcaatctgaagatttagaccatcgttatgcgcagacgccgcctccaattgctgaatctgtttctggaacttttcactgagctttgtcgtatcaccgatcactctgacacgcatgttattcttatctgcagttttaatacagtttttcagataagattccaataacttcatcagcgcacttacttcattctccgggcggttccagttttcggtagaaaaagcatacaatgtcagatactttattcccatatcatgggcagcctggcagaccgtttctacattcttggctccaacggtgtgaccgtagtttcttggcattcctttgctttttgcccatcttccatttccatctaatatgattgctacatgctgaggaattttcatattatcctaataaatcctttctgatactgtttccaaggaaacaaaaatcatctaacaacttttattgcgggttttcaccgcatatctttaaagttacgaaaatgaggacacgattttctcatgcccccactccttcttatatttcaaaacgaaacttatacagttaaaatctcttttgttttaacctccactgcctcatcaacagcagcaatatatttatctgtcattttctgtgcattttcttctaatgctttgatctcgtcctcagaaacatcttcttttgcaagtttcttaaaggaatcatttgcatcacgacggatgttacgaatagctacttttgcactttcacctttcttctttacatcctttgcaagatctttacgtctttcctctgtcagttccgggaataaaagacggattgtttttccatcattggtaggattgattccaagatcagatgtcataatcactttctcgatctctttgaccatggaagcctcccaaggctggatctgaatcattctaggttccggaacatttacgtttgccacctgctggattggtgttggtgttccataataatcaactctcaatttatcaagaacatgtggattcgcacgtcctgcacggatgcttccgaattcctctgataaattgttcatggttttctgcattttttcatcaaactgaactaatctctcgtccataaatcctccttgttttccacctatttatacagttacttttgtaccgttaaattctccgctcattgctttcacaatgctattttcttcatttaatccaaatacatacattggcattttattctccatgcacataatggatgctgtgagatcgactaccgcaagtttctggtcaatgacttcctgaatcgatacttcatcatatttcttagctgaaggattcagctttggatcactgtcataaacaccatcgattgccttagcaagataaataccttctgcctccatctcgatcgcacgcaatacaattcctgtatctgtagagaaatatggatgacctgtaccaccggcgaagaatacgatctttccttcgtcaaagcatttatttgcttcatcctttgagaaaagctttgtcatgcttccacataaaaatggagtaaaaatctctgtctccattccaaccgaacggaaaatctcagatacataaatacagttcatgatcgttgctaacataccgatctgatctgcctttggtctgtcgattgtctcagaagttcttcctctccagaagttacctccaccgatcacaataccgatctggattcctttgtctgcaatctgttttacctgttttgcaacttctgtaacggttggttcatcaaaacctgtatgtttttcaccggctaaagcttctccgcttaatttcaaaaaaactcgtttcatttatgaatccgtttcctttctggattattcattattcttggcagcaaaaaggctctcaacatcaacatctgagtagcactgggagcagaaaccttcgatgactgcaccattattgatctgtacagaacgggatttgatgttacccataacaacagcggatgtgtcaacgacaacaggtccctggacatcaatgtcacctttgattgcacctgcaataactgcagatgaagatgttacattaccaatgatcacagatccaagtccgatcttaacagttccggtgcttacgacttctccctcaattttagctgcatcagcaaaaaattcagaagaattgctgttacctgttactgtacctgttacaacaagttttccgttacatccaatgtctccctgaacgtttcctctgatatctaaagatccgtttgatacgatatctcctttgatgatcgttccctctgtgattacagatacctcatctgatactggttttgtctcattgacaactggtgttacattgtctgccatttttctttcctcctgcgtatttttcacttcatttgctggcattactggctgttccggtttctttgcaaccgtctgctgtacattcggtgtaacaggaacagattcttttttcactggtgtctgctgttttgcagtctgagatgttacctgctctaaaagaccatctaactttgataattcagattcaacatctacttcattttccagtgtgttcactactaaatcttcatcggcagtgttgtcttctaaattgtcttcacctggcattaattcattcacagcctgtgaaaaatcatctttaaaatctttaaaaaatcccataatcttcctccatttatatttagctaatcaatgctgtctgccttgacatattgaataactgatgtatcttcatcaatcggtaaaatctcagcgcccatttcatttaatgcctcaattattggtgctaatgcctctaccgttgttgacttatcggatgcgtcatgcagtaaaacaactgacgttttatattttactacatcatctaccacattcgcaactatttcctctgcagaatatgcatttgatgctgcatcccccgcagaaatgttccagtcataatagataacgccctgttcattcagataatggataaaatcactcattggtacattactgatctgattactgcttccccccgggaaacggtaataaatgctctctacaccggtcacctgatacaattcatcacgtaagcggttaaaatcttcctcgaaagcatctttcgactgataaatctgactgtatttgttggaataagaatgcataccgagtgtatgcccttcctccacgatccgtttatataattcctgtgaatcttcatcttcttttccgactacaaaaaaagtagccttgacattatactgcgctaaaatatcaagaattgcctctgtattctcagacggtccgtcctcgaaagtaagataaaccttatgtacatcgctctcactggcgagattatcttcctcagatatcccggttgccggaggcgtcacaggatcgtaatcgctcttcgtctccgtcgcttctgtaacgtccgtataaacagactcccctgcgctttccggtttttgtgcattttcctgctgtgtctgctccacagtgctcacggttacgatctggtctagcttatgctggatctttatcacctgcacaaacaaaaccgcaatcaagatcatggaaatgatgatccagccggcaattgtaaaaataatgccattccggatccgcccaattctctttctgcgctttctttgattatttattacctctgcatcatgatcctgcatggaatagtcctcacgttcctctttcgtttcctatctattgtaacacattttttcatttgtgcaacagaaaaggggcgaagccgcaaaaacagctctgtccctttcatttcataaaatattattctaatgtgaatttgtttacgatctcccgcagttcatcaacacactggtaacattctttcactttatccgttgtgcttgaggtcttttcaaccatatccgatgttttttctgcaatatccgtaacgccgacagaggattcacctaccgtatcattaatgccgcttaaagcacctgcaatctgctcgattgcgcctgcgagctgcgccatggaattcttgataccttccatgctgttcttaaatacattcgcatcatccttatattgttcactaacctgttcaaattctttgtaatcagcagatacgctcttctcaaggaactctgttgtctcttccagacattccgacatatttccaactgcctcattgacttctttgacgattgtgctgatatttgcgattgcctgtgaagtctggtctgcaaggcttccaatctctgttgcaacaactgcaaatccacgtccggcttcccctgctctggctgcctcgattgacgcattcaacgccaggaggcttgtctgggaggaaatctccatgattgttccggtcagttcattgatcttatcaactgctttcgaaccttcgattgctttttctgctttctcttttacagaattataaatatccattgtcttattgcttgcggcgacagtcttggtacgaagctgcaaagcacgatccatgacagtctcagaatttttagcaccgtcttctgccatggtattgatattttcggcttcctccttgatctgtgttacattttcattgattgtaacggtcgttgctgctgtttcctgcatgccagctgcaagctcctggctggttgccgagttgtcggaacacatctggtttactgtatccgtaacctcgtttaactcagacacattctcattgatcttctgtccggcatcctgaatattagtaaccatttcacgcagatttttacgcataatatgcatttccgttgccataatcccgatttcatcttttctgctgtataattttctgctattaacattatgtgtaaagtcaaaattagctgttctggtaataatataagtcagctggtgaattggttttgtgagcatgtttgtcaaaccccatgccgccagacagctgatgatcagacagacgcccatggtaaccgccatcagcctgaccatattggtgattggttccatgatctcacctttatcagcagacatcacaacaatcttatggtcagatgtcagtgcatatgcagcatatttgactgttccattaaaatcataagtaacaactgcattctgcggaacatttcctgactgtaactggctgacaacgccctttacaacctcgttctccacaggtttaccaatcttatcagcggtcggatgatataacatcgtaccgtcagaatctacaagatatccatatgcggaactaatgccttccatactcatgtcctgcatgacataggtgcattgggtagcaaaatccagatctgacggaatcttgtccaaggtttttgctgttgactctgtaagactcaaaataaaattctcattgacattgctgactgccgccgaagatcttacgtttgcgattgaaatacacgccataagcgataaagccaccatcacaaccaccattaacatgatctttgctgcgatggagttgataaatgatactttttcttttgtttccataactataacactccttcttgttttctggtctgtgtaacatcagcactacattagtaataattatgttaacttctttatagacacaatgataaggcactttccaacatttggcaaggcttttcaacaatattttacagccatttttataaattactgacaaaaaatgccctaaaaacataaccgtcctcagggcatttcaagatcgtattttttatgcgttcatttgagctgcaacttctgctgcgaaatcttcctgtttcttctcgataccctcaccagtctcgaaacgaacaaatctcttaacgcttacaggtgttccaactgctttggatacttcgtctaagtattttgctacagtctgttttccgtcttcagcttttacataaacctgatctactaagcagatctcttttaattctttgcttacacggccttcgatcattccgttgattactttctcaggtttctgagactcttttggatcgttcatgatctgtgctaagagaatctctttctcatgagcaatgtattctgggctgatttcatctcttgtaacatattttggatttaaagctgcaatctgcattgcaaggtttgttaaagcttcttttacagtgtcattgacaactgctgtctcagcttcaacgataacaccgattctaccaccgccgtgtacataggaaacaacacatccgtttgtagcaacaactttctcaaatctacggattttaaggttctcaccgataactgcaactttttctactaaagcatcttttacagtcttagaagcatcctcattccatttttcttccatgaatgcatccatatcagctgcatcagactcaactgcctgctctgcaacagcttttacgaactgctggaaagtctcgttcttagcaacgaagtctgtctcagagttaacttcaacaacagctgctgtcttatcatctttcataacaacggtacaaagaccttctgcagcgattctgcttgctttcttctcagcttttgcctgtccattttttcttaagtactcaacagcctcgtccatgttaccgtctgtctcgcctaaagcttttttacaatccatcattcctgcgcctgttaattcgcgcagttcttttaccatagctgctgtaatagccattttcgtatcctccaatatgaataaatgtttttaaaaaatatgctgtctggttatccagacagcatattgtaggtccttcttatgcctctgcttcttctgtagcagcagcttcttcagctacttcttctaaagcttctgcaccctgatttgcttcaataacagcgtctgccattttagaaacgattaattttacggctctgatagcatcatcattaccaggaattacataatctaattcttctggatcgcagtttgtatcagcaataccgatcaatgtgattcctaatgtatgagcttcctgaacacagattctctctttcttaggatctacgataaagatagcatctgggattttcttcatttccttgataccgccaaggtttttctctaatttctcccattctttcttaagagcaataacttctttcttaggtaatacttcgaaagtaccgtcagcagccattgtctcgatctcttttaatcttgcgatacggctctggatagttttgaagtttgttaacataccacctaaccatctctcgtttacatagaacattccgcaacgctctgcttcagatttgatagcatcctgagcctgtttctttgttcctacgaaaaggattgtaccaccttcagcagcgatatcagacatagccttgtaagcttcatctactttacctacagatttctgtaagtcgatgatatagataccatttctctctgtgtagatgtatggagccattttaggattccatcttcttgtctgatgtccgaaatgaacacctgcttctaataactgtttcattgaaataacactcatttttttacctccatggttttgttttcttccatgtgtatcattctcacagacaaccaatctggcaccggtctgtaagtcagcacatgtgatttttcccggaaaaattcttttttccaagttgagtcttgtagattatagcacaggcttatcctgtatgcaagcattttttcctgattttgcaaattttgatttaaagaattttattgtggtccaagctttaaaatctgatagatttcctcataatctaatccataaggaattgtataacttccaacactaatggaagatgcaaaacctttctgtgcgagaaacttccggaatgcctccgcatcatccactattccgtttgcctgaaggttctcacagacaaccctgcacacatctcctctgtttacaacgagtgtatacggagcggcaccctctatcgtaccattatctgtattttctgttccagcaatttcggtatctgttgtaactgtgtctgtctgatccggtgtttctgtagcagccggttcttctgtagtggcaggattctcggtatccgtctctgtctgcacagtttccgtattttcttccgtagtttcagaaacttctgtagcttcggtcgtctctgtattttctgtggactgcaaagtttcttcgtcctccggcatgatcattccaagctgcttcgccctgtttatcacatccgcatccgacattaccggtttatgcagagcaaatgcgatcatcaaaagtaccgtcgtgacaataattccaatgccaagacctcttaaataatattttaatttcacagattttcgtcccctttgtacaattcgatcaccagatttacttcgccaagcccacgtcctaactgttttgcaatctcaactttgctaagcccctgctcataaagttttaagatcatgtcattggacattccgtttgcatctgctgtgtcagtttcgttaatactctgctccacaaccggatcttcataggtatttaccatctgaatttcagaatctggctgtgtcactgcagtttctgttaccggcatctctggcacaggctgttttcttaccagtgtctgggcactgtaaacttctgtcgccggctttgcggcagatactgtcacttttgcctgcatattttcctgaagattgcggatatccgcagccagacgctgtaaatctcctgtcatggaagtcatttcagtgtgtttgtcatttaacatactataaagaaacataatctcatcatgtgttttcttcatggactccatgactgtctcagaatactcgtggatctgcatgatctgctcattcgattctttttccattgcacgttctgcctgttcccctgcttcttccactttctggctgatcacatcgtccatctgtgttccggcattgttcacttcccgctcaatgatcttttttaattcatcctcacttaattctgcgattttattcagctctgacgtagataatttctcgctgatgaaaaaacttccgatcataaaaacgcatccgatcagaagtaaaataatttcaatcgtcgtcatgttctgctccttacacctttatatcaaatccggaggtctgacccttcaaaaagacattgtcagctttctgcttctttctgtcttttttcttctgttcttccctctcataatgcccatttcccttttctttggcatcataacgataacctgcattttctttttcctgtggatgtgttacctgatgtaatttttcctctgtctttttcatttcttccgaaaaaatcatctgctgttctaccaccggacggttatcttcgttctgttttaaagtactcacatcctgggtacgctgtatcattccgttaaaatcaactggtctaatggacataatgcttcacctctactctctgtcaatgagaattccaagataatttccaagctttttgcgcatcttcaataacgcttttgtatgcagctgggaaatccgggattccgatacttcaaggatactgctgatttcttttaaagttaaatcttcataatagtataaaagaatcaccttgcgttctttctctgtcaatacttctaaagattcttccagcttctgctttaattcttcctctgcaaccttatcttccggctggataaaatgtgaatttctccgggcatccatcacaggttccgcgccctgttccagatattcattcaacgaaactacatttgtcactttaagctgtgactgccaggttgtaagttcttcatccgaaagacctaactcctgtgcaatctcctcgtcggatgcgttctttccggtacgcatctcaacctgcttgattgcctcatcgatctttttctgcttctgtctgaccgttcttggaatccagtccattttccggatctggtctaatatcgttccacggattctaaggcttgcataagtctcaaacttaacctcttttccaagatcgaacttgtcaatcgcgtcaataagcccaaagattccataacttaccagatcgtcatattccacattatatccaaggtacatgctcagccttccggcaacaagcttgacaagcggcgaatattctattatcagtttttctctaagctccggtgtttttttcttctgatattcttcccagagtttttctctatctaccgttttcatatgaagcccccaggttcaagttattcactcttgttctccccgtctgaatctgactgttcctgttcttcctctgactcttcctgctctttctcaggttcatccatctctttaaagtttttatcaagaaccagtttcacaatacatcccagtacataaaaaatcacaagtacagcaagcagtgtcttggtaaaaaccattgtttccatatgctgcacgattcctatgatgcatgtgacaaaccctgcaagcagcatcacgactgccggtatgccttttgttttcataatttctccactaaaaacgctgttaaatgttctcttaaatagttttaattggttttcctacagattttattaaaaattctcctgtgtcacaatgaagctccaccgtacgtccataattcagaccggtgtcttctgcaacaagacggattccatattgttttaagatctgttttgctgcttccgcatttcttgctccgatatttccgacatctgacagtccgctgacttcgaacatctttgcaccgcctgcgatctttgcaaccagtcttgatctgcttgctccggctgcggttactctttttaacagttcttcaataccggtatctgcaaattttgccttatttgaattattgctcacttttgtactatccggaagcatatagtgaaccatgcctccaatttttgtaaccggatcataaagtgtcaatccgatacaggagccaagtccaagcgttgtgagtccgtcaggagctttacaaacattcaaatctgccattcctactttaatgatattccccatacaaactccttatatttccaatccaagtgcccttaatattttgtgataagaatcctgctccggcatcaggataaaataacctctgattgccacatctgcacaaatctctgtctcgatcagtaatgcacgatctcctaccagaccaaattcaatcgctggaacacttaagattgctgccgccatatcaacacttatataaggaatcgatggtaaaattgtaagattcgtcatggaagctaatgcagaaagataagatgctgtgataatattaccaacctctttcaatgcagaaagttccatctcatcaaacacttccatctgctcatgaaccgcattttctttcattaacagtttgtcagccagataatgtccggattcaagatctaaaaggaacatcatgcttccctcaatatcatgggaaacttccagaaagataccaataacagtctcttcttccggtccaatcgcactgcctaattttccgacatccatcagttttacatttggtactttcatatcaatacgggtgccaaccatatttgcaatcgcggttgttgcgttaccggagccgacatttccaatctccttgagcacatccatgtacatatcattcacttcatctaatgtataatttgccatttatcttctccatctgtttttgcataataaacacagtgagaccttaaaatcaaggtctcaccttatggcattacgcattttctttttcttctacaattgcattgatctcaaataatgaaatcagttcatcaccatgtttaccaacaccgttgataaacattgcctttccatctttgcttccgcttgctttgtcaatctcatctgcacctaaagtaacaacttcttttacttcatctacaataattccgattgtgcccttttcttccagttttaaaatgatgatcctgcttgcattcgtgatcacatcatcatctaaattcatctttttacgcacgctcataaccggaacgatctcaccacgaagattgataacacctttgaagtatgtctggatcttaggcacacgtgtaatcttctgcatacgcacaatattgtcaatatagctgatatcaattccgtactgctcgctgccgatttttacaacaatatactgttttgcatcgttttcagcgatatctacatttttctccatatttgtttcctccattacatcaatgtattaacgtcaaggatcaatgcaacttcgccatcaccaagaatggttgcaccgctgatgatcttgttattgttaatatattttccaagagatttaataacgatctcctgctgtccgatcaggttatcgactacaagacctgcaaggctgtcgcctttctttacgataacaacggtcagattttccggttcttcctgtttttcttccatatccagcacctgatcgagacggatcagcggaatgactgcgccacgcagatgaatgacttcctgagcctgaacatacttgatctcattgactggaatactctcgatattggaaatagacccaagagcgatcgcatatttttcatcacggatctcaaccattaatgcctggatgattgcaagtgtcaatggtaaacgtacaatgaaggttgttccctctccaagttttgtatggacttccacatcaccaccgagtgcctcgatgtttgattttacaacgtcaagtccaacgccacggcctgagatatcggtaatcttctttgccatagagaagcttggaaggaataagagattgatgaactccttctgtgtcatgttctctgcctgctctgcggtgataacgccacgctctatcgctttatctcttacggctgcaacatcaataccattaccgtcatccccaacttcaatgataacgttattaccttcctggaatgcctttaagaagatagaaccaacttccggttttcctctctctacacgggttgcattgtcctcaagtccatggtctgcagagttacggagtaaatgctgcagtggatctccgatctggtcaactacagttctgtctaactctgtgtcttcaccagtcatgtaaagttccattttctttcctaatttgcgggaaaggtcacggatcatacgagggaatttatttacaacgctttcaataggaaccatccggactttcatgacggattcatgaaggttcgttgtgattcgctctaagtattcgatctgctcatggaaagactggttctgatactcaccgctctcgctggaactgatcgataccagactgttctttgcaatgataagctctgatacctgattcatcagcgcatccagcttctcaatatccacacggacggttcttccggttacaggctttgcattggtctgcttctttgctgccggagctttcttctctgcagcttttggagcctctgccggagtttctttctgctcggctgcggtttcctgtgccggctgttcttcctgcggttctgtttcctttacatattcatcaagatgaatttcttctaaatcaactttctcaatctcagatacagcttttgctgcagcaacgatcttgtcggatgcttcttcagaagctaagaaaaagctgaactcgagctcaaacttctcatcctcaatgtcctgtgaacttggacggtaaacaaggatctgtccaaaatcttccactgccttaaatactaagaatgcacgggctgctttcaaaaggcagtccttctggatatgaacagtcatggcataaatatgctggccatttgtctctgcttcacggacagcttttttctcctcgtccgtaagttctattttttcctgctctgctttttcttcctgtggtgctgccggagctgcttctgccactgcctgggcttttggttcgctctctgcagctgcctcaccgtctgcttttgcgataaagtcatttaattccttaatgatgacttcattatcttcggttccctcatcagaagtgctcttgatattgtcaagatatccttccaatgcatccagacatttgaataagagatcgatcattccgcttgtcactttgacacggtcacttcgcacttcctgaaatacgttttccatatcatgtgtcaaatgctgcattctcttaaatcccatggttcctgccataccctttaaggagtgtgcggcacggaacacttcattgatcgtatccttattgtccggctccttttcaagaaccataatacaatcgcttaatgtctgcagatgttcttctgattcatcaataaatatttccagatactggcttacatccatgttattttacccccacattctttgtgattgaatttgcaatttctgttaatggaaggacttcatttacaagtcctgtctctacgattgacttcggcatgccatataccacacaggtatttgcatcctgtgcaatcgtataaattggtttactttttgataattccaggattccattcgtgccgtcagcgcccattcctgtaaggacaacacatacaacctgatcaaacccacaggttcttaaagaatcataagtgatattggcacaaggcttcagtcctccgatcggcggcatatcattaaatgcgatcttgtgtgaaccatccggacacttcttaacctccatatgctttccacccggagcgatataaacggttccctttttcagaatctctccctcctgtgcttccttcacatggatcttgctgatctcatctaaacggtttgccatggaattggtaaatccggctggcatatgctgcacaagaaccataggcgcgtccagatttgctggcagatatggaatcacactctgcagcgctttcggacctcctgtggaacatgcgagagccacgatcttattcttaaaccgtttcccggcagacggattgcttcgtgctaatgtaactacaggcttcactggagccttacgctcaagtgatcttgtccgttctgtttttaagaccgcatttaaaatatttaaaagttcattcttaaaaacttcaccttttgcttcaatcacattcgaaggctttgtgacaaaatctaacgctccgcgttccatcgcaaggatcgtcacatccgcatcctttgtcgttgtcgtgctgaccattacgatattggatttgatgtgttccttctgaagtttgtctaaaagttccagaccatccatcctcggcatattcacatcgagaaccacaccgtcataacttctggtttttaacttctcatatgcttcaagaccgtcccggcatacatctgttgcctgaaatgtatcatctgaattgattatatcacatattacccttctcatgagtgcagagtcatcaacaacaagaatattttttttcataatgtctaccttttatccttttgacgtgttaatcgttcctcttcaaaaatatatcgaataatgtcttctcttattttgtcgtccttgatcataaacttaacgcgggaaacatatttcttctcctgcacctggttccgtttttcacaggaaatcacggaaccaacaagattaaattcccggttcattttttcatttgcaagatgaactaccgcaaggatgtgatctctgctttttaactctgtgtcagaattaaaacggatgccaccaccactgatatctacgatcgttccgttttttattttatcaaggaaatggtcttcacggagttccgcatagatttcctcaactgtctcaagttctgcctgcttttctgtcagttcaaaaaatttgaaatccaccgaacattcataacggtaaaactccctgcgctggaacttctcaagacgcgtctttaattctacctctaacgtatagatattatctcttttaaagcgttctactacctgtccgatgctcttatataaaaagcctccggaataaaatacaaactcaaatcgcacattcagcggaagaagaagcagctttgatccttctgtcggcattgcgatctcgacatttccgcgcttatttatatcaaggacctgactcttataaactttaatgatatctccggtccgttcttcattctcaacctgctgtagtaacctgatgtcgatcttatcaccaggctttatcaaatctgtaactgccataaaactcctctccttatgaaaggttaaataattttgccaaaaattgccggagagcattctgcccggatgcattctgttccccacctgtccacaaatactgcgccagctcttcaaatcttttcgctgattttgcattcggcgatacaatcgataccggcttttgtatgcgcaccgccttctcaagcatcgcgtcctgcggaataattcctatgtattcgataaaaccatccagaaactgttttacaacagaatccaacttatcaaataccatttttccttcactctgcgacattgcacggtttgttatcacatggatcacggactcatttttatcgtattttggattacggtaaagcattttaagcagtgaatatgcgtctgtcagcgagctcggttccggcgttgtcacaagtaaaatctccgggcttgatgccacaaattccatcacactgtccgaaattccggcacctgtgtcaacgatcacgacatccgccatggaagacagcttttcaaccgacttcaccagataactgatctgatctggtgtcagattattcagtcccataattccggaaccgccggatataaagccgactccttccggtccgtctgtaatgatatcctcaatctctttgtcatgatagatcagatcgcttaaactgtattttggaatggttccaaacatcacttccacattcgccagtccgaaatccgcatcaaaaataatggtttttttccccatgcgctgaaactgcacagcaagattcacggcgatgttagacttcccgacaccaccttttccacttgtgatcgtaatgatccgggcaggctttttaattctctgattctgttttttgatcacattacgcagctcttctgcctgatccatctgttactttcctccaagtagctgttttaccaccatctgggtattaaatacatcaaaatcatccggaacgctctgaccgtttgtcatataagacaggtcggctcctgaatataaccggatatttaaaatgttgccaaacgaagtggtttcatctaattttgtaaaaataatcttatagtctgcgatttccttataaatatcaacaatctccataagatccttgtatttggtcgtagcacttaaaacaagataaacttccttctcatatttttcatcaagaccatcgatcagtttcttaatatcttcacgctgttcctcatttctatgagaaaatcctgcagtatcaacaaatacaagatcatattctgtgagtgtatctaatgcctgattgagttcctccgcagaatatacgatttttaccggcgcatctaaaatattggcataaatcttcaactgctctgccgccgcgatacggtaggtatcagctgtcagcattgccacctttttatcatgctccactttgtatttggctgcgatctttgcaatcgtggttgttttacctacgcctgtaggtcctataaaaaatataacacgaggtttctttcctgacaagtcaatacagtttggctccccaagttttaagatcatcttctgataaacattggaaagaataatatccacattgctgccgctgtttgtcaccttctcagcttcatctaaaatctgattcacatacttctcgttcacgtcattgtttaacatcgtacggtaaagcattttcataaacttgaagttttcaagattctttggtgaaggcttcggtgtagctggaatttccggttcacggattgcgtcctctgtaagctttttctctaaaatattagaaagattctctaatttcttttcaatgtcgcttccgctttttgcaatggagtcttccttctcggaaaatgccggacgtttataaaccggagctgtctcaggagctttttctgtctgaaccggaatatcaattttttcatccgccgcgagattaatattttcaatctttttctgctgcattgccgccatctggacagcatttaaaaactgttccttctcctcgattgcagccgtaacctcataggtagaaccttttaaaaatccaaaaagtcccttcggttttatctctttcacattcatcacaacagcagctgctccaagctcctgtcttgccttctctgttgcctcttcctgtgtttttccctggaatttttttattgtcatttatgctgtcaccatccctactgattgtaattcaatattcgattccacttcattataggaaactacgatcagatccttaaagtaatcttccgttaatttcttaaagtacatacggacaatcggcgatgtgatcacaatcgcatttttacccatattctcaagttttgcaacttcctgttccagtgaggacataattgccttggtacgatccggatctaatgtcagataagctccctgctcggtctgttttacagaggacatgatttcctgctcaatcttcggatctaaagtaatgacactggtcgtctcatttgccgggaagaacttatttgagattgctctctttaagctctggcgcacatattctgtcaggacatccgtatctctggtcactgcggcatgatctgcaagtgtttcaaaaatagttaaaagatcacggatggaaattccctcgctcaataaattctgtaatactttctgtacttcaccaagaccaagcaattttggtatcagttcgtccacaagaaccggattgctctctttcagattgttgaccagattctgaacatcctgtcttgtgagcagttctgcaatatggttacggatcacttccgtcagatgtgttgcaataatggacggtggatcaacaaccgtataaccaagactctccgctctctccctctggctctctgtgatccagattgcaggcaaatggaaggacggctcaaatgtcggaatacctgtgatctcttcctcaacatatcccggattcatcgccatataatggtcaaaaaggatctctccctctgtcacctggatacccttgatcttaataatatactggttcggattcagctggatattatcacgcaggcggatgatcggcacaacggtaccaagttccaacgcgatctgtcttcggatcataacgacacgatccaaaagatctccaccctgatttacatctgcaagcggaataataccatatccaaactccagttcgattgggtctacctgaagcagtgaaacaacattctccggtttgcggatctcctccgcctcagtctctgcctcgctcacttcctcctcaatgctctctacctgaatattcttatccatcatacgacctgagataataaacacaagtccaagtccgacaaaaagataccacgtcagtggtgttacaattccaaggaatgcaagtgttgcaccaacaagataaagaaccttcgggataccaaaaagctgttttaccagaaccgtaccaaaatctgcttccttggaagcctttgttacaagaataccggttgacagtgaaatcaaaagagacggaatctgggaacagagtccatcaccaatggtaagaatcccatactgctggattgcctctgaaaaagctagtccctgactcatcacacccataaccgtaccaccgatcaggttgacaaacgtaatgataagacctgctgttgcatctccctttacatactttgtagcaccatccatggaaccaaagaaacttgattcttcctgaatcttatttctgcggtctctcgcttccttctctgtgatcgcaccggtatttaagtcggcgtcgatcgccatctgcttaccaggcatagcatccagagtgaaacgtgctgttacctctgcaactcgctcggaacctttattaataacaacgaactggataataacgagtatgataaacacgatcataccaatgacaagatcaccaccaccaacgaactggccaaacgttgtgacaacattaccaggtgctcctgttgaaaggatcagtctggtagacgatacgttcagggaaattctgaaaatagtcgtgaacagtaaaagagtcgggaagaaagacatatctagtacttccttcacgaacaaagtattaaacaatataatcaaagcaatcgcgatattgatcgcgatcattacatccaataaggtggaactaattggaacaatgaaaaaaatgacagctgcaagcaaatatagtgcgacaccgacgtctgcttttttcatgccttttcctccttagtctatctctcaaattatttttctctcatattgtaaaccattgcaaggatctcggcaactgcctgatacaattccggtggaatttcctgcccgatatccacgtttgcatacaacattcgcgcaagtggtttattctccacaatctcaatatgatgttccctggcagcctctttgattttctgtgccagataatcttctccctttgcaagaacgaccggtgcttttgaagtctctgcatcatacttgatcgcaaccgcaaagtgagtcgggtttgtgatgacaacgtccgcttttggaacgtcctgcatcatacgtcttctggaagcctcgcgcatacgctgtctctgtctgcccttgatctccggattaccctctgtatttttaaactcgtctttcacttcctgcttggtcatcttcatatcttcattaaaacgatacttctgataaataaaatctgccagaccaatgactaaatagacgagactgattttcaaacctgcattaatgatcaccgttccgcaaagcaggattgcctgcatcaaagggatctcataaagtataaaaatatcctgcgcattccctttaattgaggtatatgcaacatagatgatcacaaaaatttttaaaatggatttaatcagttcaaaaatagaatccttggaaaaaatcctcttaaatccattgattggattaaacttatcaaactttggctgtaagggtttgcctgttactttccacccaacctgtatcacactgatcaaggctgttacgataaaaccaaatgcaaagaaaggcgcacaggtaattaaaatctgtatcaatacatctgacagcagtgatgagacagacttggcagtcacatccactgcattttctttcacaaaatcaggaatccgcccataaaaatcagtaaacccattcatgagcctgtttcctacaaatgatataaaaatttttaaaacaagaaataaaacgataagatcaaatgccgccgtcaactccttgctttttgcgactttaccatcctctcttgcttccctcagtttctttgcagtcgccggctctgttttctcaccgccgggaccatcttttgcaaaccactgaaggttccattccatgatcaaatgtaactgtgtctgctgttccaagttcctacattcctttatatttaatctgtgtcatcctcaatacatgccttctatgaaaagcaccatcagttttttcatttcagtaaaaatgaaatttgccacacttggcagcagcgtgacggtcagaaataacacaacaaatcctaccagaatcttcatctgcataccaaccgcaaacatattcatctgcggcgaaaccttcgccatgataccaaggatacagtttaagatcataatgcatgcaaacaccggtaaaataatccgaaatgcgatcacaaacatatcccccatataagtcgtcatggatttcatcagatgattccagtcaaatacctgaccattgatcggtatgactgtaaatgcatcaataaaggctcttaaaatataatgatgcatgtctgtcacgactaaaagcatcagaataaagtaattatacagatttcctgtcaaagttacctgcgcattattgatcgggtcaaattcggttgccattgaaagaccgatatccatatcaataatattacccgcaaataaaataatggaattacaaacgtttgcagcaagtccaatcagcaaccctgtaattccctcttttaaaacaatgactgcatatcctataagtcctgtatattcgatctgtgaaaaatctgcaaaaccatacacaagcagtgtaatgaaagcagataaccctattttcacctgattcggtacatttgccattccataaaatggcgcaatatagataaaacaggatacacgaacaagtattaagataaaaatttcaaaattttctaatgaaaacgaatactgcaccatatgtcaaacctatccaagatacaaactgaagttcgaccataaggtcgtcacaaatcctgacaactggttcaaaatccatgaaccaaagatcatcattccaataaaaactgcaagaatctttggtacaaacgtaagtgtctgctcctgaatggatgtcactgtctgaaaaatactgataatcaaaccgactaccagtgagattaacaaaacaggcgcactacagataataatgtaataaatagcctctcttgcaatatcaagaacctgtccttctgttatcatatctactcacctcagattccactaataaaacgtttttacaagacttccgatcacaagatcccatccatctgccagaataaaaagcaatatcttaaatggaagcgagatcgtcgtcggcggtaacatcatcatacccatagacatcagcacggatgctacgaccatatcgattacgataaacggaatataaatcacaaaaccgataataaatgcagctcttaattcacttaagataaatgccggaaccagtgttgtcatcggaacatcatcataactgtcgtaagtctcattcgagatatcaacgaacagttttaaatccttttcctgtgtctgcccatacataaactcccgaagcggtccctgtgcaatcgtaaaagcttcctcggtagtgatctcaccctgatctaacggctgtatcgcctctgtgttgatctgctgaaacgtcggccacataatgaaaaatgtcaaaaacaaagccaatgcgatcaacacctgattcggtggtgctgtctgcgttccaatcgcggtacgcaggaaatgcaatacaatgataattcttgtataggatgtcagcatgatcagtatcgaaggcgccagtgataaaattgtcaatacaagaagcattttcactggtgctgataaagagccaccatcattgttatatgaaattgtcaaaccatttgtgttatcctctaccgcgcgcgctgcactctctgttgaatccgtattggtaaaatccgtaatactgtccgggtccatggaagctgcatatacagtggagcctcctatcgacaatgacaatgtcagcaccagtacaaccgcagctacgataaacgataccatacaatatgtttttttagcctttgtcataattaaaacctatttctttggaaaatgttttttcatgcgttctaaaatctcatgaaaattttcctgtgcagcctttccatccattggaaacttattctgcattgcggaaaaatcaggtatttcactgagctgttcttctgtaagctgtgtcagtaaagtgacttcatccttaccaactgcaaccacaagataaacctctcctgccttcacaatcgcaatgaacttattatttccaacacgtattgattccacaatctgtaaattcttgttgaccagattcgtcttctgataattgccgatccacttcgttgtataaaacgtgatgaacaggacaacaataaaaatgatcaatacgcctatgagttgaaggaaactgcccaatgcagaactgagtaatatcatattaacctacaactttttttactgcttcaagaactcgttctgcctgaaatggttttacgataaagtcttttgctcctgcctgaattgcctcgataaccattgcctgctgtcccattgcagaacacataatgatctttgcacctggatctaatgctttgatcttctttaatgcttcgattccatccatctcaggcattgtaatatccattaatacaagatctggttttacttccggatatttttcaactgctttctgtccgttttcagcttcggcagcgatctcataaccattcttagttaaaatatccttaatcatcattctcataaatgctgcgtcatcacaaatcattactttagccatattatttgtttctcctcttctttcctatcttattttacaatctcggtgattctcacaccaaaactttcttcaattactacgacttcacccttggcaacgtattttccgtttacaagaatatctattggttcaccggcgattcgattcaactcaatgatcgtaccaggtgcgaaatccaaaatttcatggatcgactttgtagttcttccaagctccacagtcacttcaagcggcacatccataataagaccgatattctccgcccctgcaacctgtgcaatgtttggattaaaagcctgaaactgtgccggctgaacattaaccggctgtgtatacatctgattcatattcggtgccatcatcggctgtcccatcattggctgtcccatcattggctgacccatcattggttgtcccatctgctgatccataatctgctgtcctcccattggctgacccatctgctgattcatctgaggctgaggtgctgcggattgtccgcctgccttcttctctgtatcatttgatgttgattcagaatctgcttccatattcttcgtgatatttgcacacatctcttttgcaaaggaaatcggatataactgcataatctcactgtcaacaagatcgccaatctccattttgaatgcaatctttacaaatgaacctgataaaaattcatcaattgcactctcatcaatgctttccttcagatcaataagatctgcgactggtggactgatatcaatcttcttattcagcatggaagaaagggaagttgccgcagaacccatcatctggttcatcgcctcgctgatcgcactcaaatgcaattctcctaactctccgtctgtgttcgtaccatcgccgcccatcatcaggtctgtgatgactttcacatcatgctcttttaaaacaagaatattgcttccgtctaatccaactgtatacgctatccgaataaatacacacggcttctcatatgcatcgcagatatcgctccacgttgcaaaggaaacaaccggtgtcgaaatttctaccttacggttaacaagggaaaacaatgttgtagctgctgtacccatactgatattggcaatctcgccaattgcgtctttttccgcacttgtcagcagatcatcctgatctgcattatcctctggggaattcagcaatgcattgatttcttcctgtgataaaacaccatccattactactgctcctctcttaccactgatgtaactcttactgcataattatcgccgacagctcccggcagagcagtaaattttttaatatttccgacaaatatattcaaatcctgattcacattcgaatccaatcggataatatctccaacctgaagattcacaaaatcatccactgaaatcgtactcgtacccaaaactgctttcacagggatcttcgcttttgagatcaaagcctcgattgcatctgtgtactgcgtatcatcgcgttcctgaagattggaataccagaacttcgtattcagcttgtccatgacactttccaatgtcagatacggaagacagatattcataagaccttccacatcgccaatcttgatatgtaatgtcactaatgcaatcatctctgtcggtgaaatgatctgtgcgaactgggaattcgtctcaatcctttccagccgcggactaatctcacagacgctcgaccaaggttccgggagaaggcttacacatacattgtaaattctctccagaatcagaagctcgatctccgagaaatctctcggcttatcaagtggtgcaccaacacctccgagcattcgatccacgatcgcatatcctaaattatcagcaagttcaataataatgctgccactcaaaggcgatacattcaccaatccaagtaaaaccggattcgacagcgcattcgtaaattcagaataagttactgcctctgaattcatcacctctacctgaactgttttcctcaaatagacaggcaggttcgttgaaagaagtcttccataatgttcaaaaatgatttccaacgtacgcaaatgctctttcgagaactttgccggacgggtaaaatcataatttttcacttgtttttcgtctttttctttcatgtcctcagcatcaagctctccactgctcaatgcctgcagaagactatctatctcattttgagataagacttcacccattctctttcaccacctagcattctaatttactgcgtatttacactggagaaacttaccccaacgataaagtcagaaccgaacatctcctgcagatcttcgagaatagcatctttaacgctctgctcgtcctcccggaactgttccattgtatatccggaaacaatggtattgatatcatttttgatcaatgtttccttcgctttcaatccttctgtacctatgctcttgtatccgtcactctttgtattcagtgacaaaccgatagaaaatacagctacatggtcttttccatcgccgcttggacttaagttgacggtaaagctggcttcaatatcataaacttcaacgtcttccaccggaactgcagaagtatctttgttgccaccgtcctctaattccagatcaattgccgatgcgatcttgtcgatcagctgatttgattttctcgtctgaggaatgatcgtaaaagcaagaatagcagtcaatacgagattcaccagaactaatgcaaggataattactgtcatcagattctttttcattgtctgtgcctttcttttattaatttatttcagaataataggaattataaatcttaatctcaacacgtctgttccgtgcccttccttccggtgtggagttgtccgcaatcggtacatattcccctcgtccggatgacttgatatgcgaaggttctatcgtcgtgatatcacgcatgtaatccgcgacatacaaagcacgatacatcgaaagcacatcattgttctcatattttgaagaatgcgtgaacggaacattatccgtatgtccctctatctctatcatgttctgctgataactctgaagaatctttccaatcttatccatcaaaggataggcttctgacttgatctcagattttccggaatcaaacagcactgcaccatttaaattcaacagcacatattccgcattaaaatcgatttccacctgatcctgtatgccatattgtgctacaagatcctgcacctgctctgccatctgttctgactcggcaagcgcttcttctttatactcttccgcaacatctgaactttctgatgtatcatctgtcgtctgcgtatttgccatctgattataatagatgtcatacatctgtaactggctcacgccggaagaaaccatctcaccatctccgatggaagctccaccactcggcagaatactaaagctgctctgcaaagatgcgatcaccatctcaaacttctcagcatccactgttgacatagaaaacagtaaaacgaaaaagcaaagaagtaaattcataagatcactaaacgtcgccatccatgccggagcgcctgccggtgcttcttctgtcttctttcttgccactatgcttcacctccggctgcttcatcaccttctccgagacttcctactgcctgtggtgtcaggaatgatttcagcttttcttcaatgacacgcggattttcacctgcctgaatggaaagcaatccttccacgatcatttcttttattgcaacttctctctcattattcaccttaagctttgacgcagttggattacaaagccagttggcgatcaatgaaccatataatgtagtgaccagggcaaccgacatagccggtccgatactcgatgcatcttccagattcctaagcatgttaataagaccgatcagcgtaccgatcataccccatgcaggacctaattctgcccatttctcccagaatgcgattactttcttatgtctttcttccatacaggacaggcttgtctccatgatgccacgcaccagttccggatccgtaccatccacaacaagcattacaccctttttcataaaatcgtcttcaatatcattggctgcttcctctaatgcgagcaagccttcttttcttgccacattcgagagatcaatgatctttttgattgtctctgccggatcttctgccttttccttgaaggtaagtgtaatacccttcagtccgttaatgaaatccggtaacttgtgtgctgccagtacaccggagatagaacctccgactgttatgatgatagacgccgaatcaaccatgtttttcaaagcttcaaatccaccattactgaaaacaccgaatacaaacattactgcgccgagtattataccggctaaagatgcgatatccatatcttccacctgccatccttgttaatatatttaaaatttaattctcattttctgctttaaatccagtttccataatttcccgcttatatgattttactaaactttttatctgttgtctactttcttttacaattattttgcgtcctgtcgtgaaagtgatcacggtatccggtgtttcttcgacaagttcgatcagatccgcattcaccaaaatctgtgtaccatttaatcttgtcacttcgatcatagtgttcatcctttccttattgttaacagacaatgaaaacaatgaaacaatgtttagtataccatatcttgttatagtatggaacatatttactaaataatcgttactttttttatactatttctattcaaggaggaatctataacgttttatagattcccccattcagtttatattatcgttttaagtttacaagttcctctaataatgtatcggaggttgtaataacacgggagtttgcctggaaaccacgctgtgttgtgatcatggacgtaaactctgaggaaaggtctacgttcgacatttccagctcgccggttgtcatggaagaaccgtctgcagaaatctccacaccgatgccatcaaattcaccggagtttaaggttgtgcggtagcagctctctccgactttctcaagaccggatgcgttggagaactgtgcaactgcgatctgtcccaacaattccgtattaccattgtcgtatgtaccatagatacgtccgtttgtgtcaatggagatacctgtcattgctccaagcttgcgtccttttccggttgtaccgtccactgctccggcatctgcgccgattgtggatttaccgctgttgttgtagtttaagcactgggtaaaatctacattgatatttgcaaagtttccattggcatttaagcttgtagtgttcaggttcaattccacactcttatctgttccaccaccaatgctgctaaactttccatcctctgtattgaatttcaataaattagtcgcacttttctttacaacctgataggaatgtgttccatctgcatttgtaacatctttaaagacataatcagtatttccggcagcaatactgttctgaatatttttcaaatttccatctgaaacgccgaaaacatctttgattgttttaccagtatcgacaccagcctttgaaatcgttccatttgcattaactgttacttcagcaccatctgtatcatccgttaattttcctgttgcaggattataagtatatccgcagcctgccaaagttgttgaataagaagcaactgttgtctctgtatctgtattaccaaagatttccttcatctgtgcctgtgtgaatccttcagtaatatttttattattgctatctaaaatagatgtcagctctactgtatactctccatcctttgcagttgccttgattgcaaattttgcggtgtactgatagccaagattatcgtaaaagttaagattcataacttttccggcatcactcttaacatccgcatcattctcatccagcacaccggcgatagttgcctgtgtggttgcttccggtgcagaagtcaggttcttctcctgcatgatacggagtgccgaaacagtatccttacgaatctcacctgttgtctcgtcaacctgccatcccataaccgtataacctgttgaggacatacacaagttaccggaaccgtctacgtagaaagaaccggaacgggtaaatacgttctcagaaccattgtttacaataaagaagtttgttgagtttttatcagtcagacggatatcaaatggatttccggttgtctcagatgcacctgcagaagtgatgctgactttggttgctgccgcagttgtaccgagaccgatctgctttgcattgacaccgccggtaccggttgttgcatttgctccggatgcattcgaagtggtctgatataagatatcactgaatgttacggaagaagatttaaaagctactgtgttgacgttggcgatattattaccgatcacgtccattcttgtctgatgtgtctttaaacctgacacagcagagtacattgatctcatcataatgaaatgacctcctaaagttcttttggcgcagggtgtctggtttcttctgtcagtcagaaaccgattgctcccctaaggtccagctatatgatcactgcgccatcaatattggtataaatgttgtcatcggattccgtgcggtccattgctgtcacaactgttttgtttgggacatttacaatgaatgccagagaatcaacgattacgagtgactcccgaattcccttttcacttgctttttgaactccactctccagccgttcgctctgttcctttgacagattgatttttctgttctccagtctcatggaggcatgtttggaaaatttcagttccaagctctcagaaacatcctgtttctgttttaaaatttcctcaaaggacaaccccgatgcattgactgcggaatttccttttccggtaccaagataacggtccgtgatctgttcaatcgaagtgaattggttattaattttattcataaccccatctcctgttactctgtcctgtctgaactgttatctgttgtatctcctgatcctgcacttcctgtttcttctgttttgtctgtactatcagatttgtctgtgctatccgtcttgcctgtgctgtcagctttgtctgtactgtcagtcttgtctgtgctgtcagtcttgtctgttccctccgctttgtcagatttgtctgttttgtcagatccatctgcagattcgtttgccttgatcagttcttttaatcttgcctcaagttcttcaaacttcttccaggaatctttggaaacgaatttcttctggtaatcgctcagtccatcatacatcttacggatgctctcaatatcatccttgtttgcaagcgagattgaatttttggatggcagtaatgaaattgcggatttaattgtctctgcaagtgtcactgcttccatataatctgcatctgcaacagtatccagatccttcagattgtaaagtccatcattgacagaaagaaatgtttctccgtttttgtgaagtacataatcacaggttcctgcgatatagcttgtctctcctgttgtagatgaagtcactttcatgatgacatacttgccaaccagatcatttgccgaagaagcctcgatcgtactctgcacactaagctgtgactccaactgtgagaaggtcgcaagctgtgcaatatactcggtattacttgtcggttccaacggatcctgatactgcatctctgcgcataaaatctgtaagaactggtcataaccaagctcgttggtctttttatctttctcggacgattttgttgatgtactgcctgtaccggtagtctcatctataaattttccatcttttacctgctgaattaacgccattgtctctctcctttctcaaaacttatgcagtgtaatctacactgtttccctgttctgccatcattttggctgccagagtttcttcttccgacatcacgccggataattcacttaaatcattcagatttaatctgcgggttctgcctttttctttttcctgctgctcgccctgctgtttttcaccttctgcattctgctcaaggtttttctcaaactcatggcttgcaacggtcacttcaacagcatccactttcacaccagcctgctctaaattctgtctgagttctacggtctgggcttctaatgcctcttttaccactgcattctgtgtcatgatctttgctgttaccgcaccttcctgctcggtaaccttaagaatgatctttccgaggttctgcgggttcagctgtaactccatgctcgtcttatcttctgtcaggatcactcttgcggactctacgatctgatcgatcacatcctgtgtgttgaccgtttgcggtaatggctctgctgtctctacgtttgtgatctcctgtgccacctgatgctgtggtgtaaccactgtctcatttgctgccggaacgttgccttttgtgaatttgaaactgctgtctgtgtcagaagtattcttctgttctccggaatcttctgtctcgttttccaagttctgcgcttccggaatgatttcctgctcggaaacatcctctgtcacatcagattgtgctgtatcttctatgacttctgtctgttctttgactggtgcattttccactgcttttgtctgacgtttatcctccaccgtaatgtccggtgtccgggcagctgtatctgcaatggctgtctgctccggttcaactgacgatgtggtattgtcctgtgaaactgtttcttccacatttgccacagtatcatccgctgcgagagcaactgctttctggaattcttcaacattcattccaagtgcatttaaaacatcttttccaatgtcgttcacactctgcagtacgttcacaaactgttcgctgcataaaagctgctgtacgctgtctgctccggtaagttctgccacaagatttgcaagattattctgattgagtaaatcctgaaactgaagtccaagtgtctgcatagccgcttcgatagcttcgtctgtcacgccgagttcttcttttaaaacttctttgacgtcttttgtaaactgctctaactgctcttttactgtgtcatcagatgtaacctgcttcgtctccgatgcaatggtattatctttgtactggtacttctggtaattgtccgatactgtattggtatcttttccggaagctgcagtttttatagtttcgttatggttgacatccgcataagctgctgtctgacggttgtttgtctgtctcatcatagtgccaaaatcaacttttgcatttgtacttctcgtggtattatctgtgccctgtacggactgcgtattttgtgccaacagttttcctaaatcggaaatggttgtacctgccatatggtctcctcctttctttaagatatcgtattgctttttatctattctgaaggctccatgatctccgttacttttgctgcagtatcggaattcattttgccaagaatatcggctctggactgtgtatccagatttgataatatatctgctaccaattgaaggttatctgtcattgtgtcaaaaatggctgccgcctctttcggcttcatgttggaatatgtttttacatagtcatccatctgctcatccgtcagcgtctgctcaaccacctgtttataaagaacttctgcatttgctgcgtcaatactctcgtaatattccttataattacttatatcgggagcatcatcggaaaagacaacatcctcataccatttttctttttcctgctcaaacgctgcctcattctgcttgtaagtatctaactcttttgctttctcctctaactctgcaatgtagtctgcatccgaatttgcactgttctgtgcgtcagccaactcaatctcaagttccttgatccggttgatcgcatcatcaagattcgtgtaagcatactggctgtcctctgttgagacctcttccacagcagaatccggcaaaatcttattcagataaggaacatctttgatcaccggggcaagcacgcctgaaccaaagccgccaacatctaatttgatcagcattgcaaagattgcaagccagattaaaataataatgatagtgacaaagaaaacaaggattttgccaccgacggtttcttcctcgccgtctaagtcatctgcgtttttctgttttttcttctttttttccagcttctttgctgcttttaactgctttttatctaaagtttcattttcctgttgtaattcttcctgttgcatttcatctgccataatcttatccatgcctttcgtgtatattgccttatcagagttatggtgtatctgacattccctcatgataggtgtaacttacaagttcatctatctctttgttctctgcatactgcatttcctgtttaaacacttcaaacgcctgctcttttaacttctcatgcgttttccgttccatcatgacctcatttaacttgtttctggcaagctccacatttttttccgccacgtgcacattcatcatctggctgcgctgcatggtcttcatggcatctactgcccgcttgcactccttgatctttggaacatcaatcgttccgtttacaagctttcttgcctgactttcatagccagccttgcggaacatgatctgctgtagctttgcctgctcatccatcagttttgcattagcagttccgtaggcaatctttgcctgaccttccattttctctttgatatccaaaatgctttgcatgcggtatgcaaactttgccatgtgaatcctcccttaactgcggagcatatgaactgtattttaatcctgaaaaagtgcccggagcagattgatctcctcatcaaactggaacttctcatctgtcttctgtgtcagaaaatcatttacagcatcaattttctggatcgcataatcaatgtttttattggaaccgtttttgtatgctccaatgttgatcagatcttccgcctcattataagtagcaagcacgtttttcagttttcctgccagttccttatgttcggatgttgcgatcgcactcattaccctggaaatactctgtaaaatgtcaatcgccggataatggtttttatgtcctaactttctcgacaacataatatgaccgtccaagatacttcttgcagtatcggtgatcggttcgttaaaatcatcaccatctactaaaacagtataaagtcctgtgatagaacccttatctgaagttccggcacgctctaaaagcttcggcatttcggaatatacactcggtggatatccccttgtaaccggaggctccccggatgccagtccaatctccctctgtgccatggaaaaacgtgtcagggagtccatcatgagcagaacatctttgccctgatccctgaaatactctgcgatcgctgtcgcggtcattgctgctttcttacggatcagtgctggtttatctgaagttgccacaactacgacagaacgcttcataccttcttctccaaggtcacgctccacgaattcacgcacctcacgaccacgctcaccaattaacgcgataacattgatatctgcctttgtattccgggcaaacataccaagcagggtactttttccaacaccggaacctgcaaaaattccgatacgctgtccttttccaactgtgataagaccatctactgccttaacccccagtggaagcacttcactgatgatttttcttgccatcgggtccggcggcgctgcatctaccggatattcacaaagtgtaccgattgtatcggtgtctgtcgggcggccgacaccatctaacgtatgtcctaatagttcatttcctacagagacagataaaggatgccccgtattttccacgatacatcctactccaattccttccacgctgtcataaggcattaaaagtagtctcttatccctgaaacccacaacctcagccattaccactgtgtctgtttcttcatcaatgataattctgcataagtcattcagttttgcatccggaccaacagattcaattgtcagacctacaattttcacaacttttccaagccgcttaaaataggtgttctctgccagccgtaaatacttgttatacctgctatccactttcaaccatccttataagcatagtgattttatatcttttataagattttcaagctgtaccccaaggctgcagtcgaatactccggagtccgtctcgatcacacaggaattgccgtccatagaggaatctgccacaatctcgatcccaatgccgcttcctacgcgttcaatgatctcctctttgtggttctctaaaaacttcacattgcttcctgcaactttgatacgaaactccttgtctccttcgatattcaggattgcatcctcaatgagatacatcaaaatatgctttttattatcaaactgaatatggaacactttgttgaagacctctaagatcacatccacaaggtctttttccatatttttctgtttttcccgaaactctgtctgaagcatttcctgctgattttgaaattcactctgcagttcgtcgcgtttcgcactaaattctgcttccagactctgtctgccttcctgatagccagcgttttttgcttcttccctgacttgttcggcatcctgcttcgcctgttgtaaaattgcatctgcctgtgcctgcgcgtccgctaaaatcttttctgcttcttttctcgcttcttctgtatggtcaatctcctccacataatcagtgtccgggccgacgattccggctgcgaagccgtcctcatccaccttcttctgttctatgttgtggagctttgccatttgttctaaacgtttttctacaatatcattggaattaatgatacgttttttatccggctcattgtgcacgaaatattgtttgtaaagattaggcaataatctcgtcacctccgcctcttgaaattacgatctctcctgcatcttcaagcttacggatcacgctgacgatcttctgctgtgcttcctcaacatccttcatacgaacaggtcccatgaattccatatcctctttgatcatggcagccaaacgttttgacaggttgttaaagattgcattctgaacatcttcgtttgcacccttcaatgcaattccaagatctgagttttcaacatcacgaagaacacgctggattgctctgtcgtcaagaagaaggatatcctcaaatacgaacatcttcttacggatctcatctgcaagttctggctcttcaatctcaagagattccataatatgtttctctgtagaacggtctactgtattcaaaatatttacgattgcgtcgacgccaccaacgatcgtgtaatcctggttgaccagagaagaaagtcttctttctaacactcgctccacctctttgatgacatccggtgatgtacgatccatcattgcgattctcttggcaacatccgcctgtttttccggtggaagtgctcctaataccattgccgcctgtgctgcggtcagataggataagatcattgcaatggtctgtggatgttcatcctggataaagttcaaaagctggcttggatctgtcttacgcacaaactcgaatgggcgaacctgtaaagaagcagtcagcttggaaattacctcctgcgctttctcctgtcctaatgccttgtccaaaagttcttttgcatatccgataccgccctctgcgatatactgctgtgccagacatacctggtaaaattcgtttaatatatcttcttttatctgtggagatacgcttcttgtattggcgatctccaaagtcagttcttctatttcttcttctttcagatgtttaaaaatatctgcggaacgttcaggtcctaaggtaatcagcaaaattgccgccttctgaacgccattgtaatctgcggttgccatattctactcccactcctcattcagccagtttctaagcaaagaagccgctgcttccggattttcttccacgaatttttcaatcagtattcttgtctcggacttctcattaaatccgatatcctgcaatgcgtctgctgattcctttgtagattcaagcagggattccacggaaagctctggttccggctccaccactttttcttttcttgtactgcggaatactacataacccaacagtgcaaagatcaatactgcaaggatgatctgtaagtaatctgatattgtacgtgagcttcccttgctgtactggaacatcggctgattgtatgcaatgatcgtaatgttgctctccggaacacccgttgcatttgaaatcaatgtgtaaagatcctggtctactgttgtcttgaccggttcactgtttgctgccacatactcgtcaaaggtcatgttatcgagttctccggctgcacgcagtgtatcttcatcataaatcacataattcgtagctaccgcggaaatggaagatccgtcataattaacggttccaaccgccggtgttgtcgtcgtgatcttctcgttattctggtaatttgtattcgtctcagacacactggaacttgtgtaatcattatcttccaatacataagtcgtatcatcgtcattggaatcggttcccggtgttgccgctgctccaccgactgcattcgattcatattcactctttgatcccaccataccgtttgtctgtccatccggcgcataatactcatgtgtggattctgtggtctggtcaaagttcatcgcaagattcagaccgacctccacattatcaaaaagttcagatccaacaaggacatcttttacctgtccttttacctgattctctgcttttgtctttaatgataactgtgtattggcatttccagttaccgatgtctcatcctcacccgaatagagaacattcatagcactgtctaaaatccgcacatttttcgtgtcatcatttccaacgttcgctgcaagatattttgcaagtccggctgcctgttcctcatccattgttccgttcaacgtcagaataactgtgacataagcctgctcgccttttgagagaatggttccgtcctcatccggcaagtctaaagtcactgccgctgcctctacattcgaaaacgtctctaacttctcagcatagtattcttccagatataacttatatttctttgttttatccgcctctgtggaactgaaaccgccgtcaaacacatcgtttaagtttgtaccgcttgttggaatatcattcgttccaagtacaatcgaagcgttggcataatctttttcgtttaccttaaaagcaagtccgtcggttgaaagctcataagagattccttccgaatcaagaatgctcttgacctgtcccgattccgctgttgtctcgcaggtaactaatgttaccatgttcggtttggaaacgaccgccgctaaaattgcaagtgctacaagcacgaccgcaacaatactgatcagcagcgttttctgctttgtgttgaattttttccaccattcaagaattttatctaaaaccttttgtacctgttccggcattttctctaacctcgttcactaaatttgcatattcatgatttctttgtatgcatctatgatcttatctcttactgcaactgtatactggatcgcagtgagtgctttggtctgtgccgttgtcagatcatgtgtattctctgcctgtcctaatgcaaaacggattgcctcagactgtgcattgttctgaagatcattcgtctctgaaaccatattcattgcagaagaaagtacagagctgaaggaatcatcctctgttgccacaagctggttcttctgtgcgatctgattcagataatccgaactaatatttgtcaaggaactgatgtccatatgtcataccaccttacttattgttattttccaatggaaagtccgctctgtgcgattgactttgctgcttcaaacgctgttgtatttgcctcataggcacgggatgcatcaatgaggtttgtcatctctgtgacagtattcacattcggataagagacataaccgttctcatctgcatccgggttcgatggatcatattccataataaaatccgtctcagtatcttccttcactgaagaaaccttcacaccattgccgacgaactttgctcttgcgctctggtaatactgtgtaaaaggtgtgatctctttctctgcaaatgttacgatctttcttctgtatggtgttccgtcttctgttcttgttgtattcacgtttgcgatattctctgcaatcgtatccatgcggaaacgctctgccgtcataccggaagcgctgatattaaaagcctgaaataaagccatttttatcctcctgtagtcttattctgtctttactttaatactgcctgcattcttgtaaaatcagatgttatactgtttgtaagtgcctgataccggatcgtctccgatgccagttccacattctccgtatccgggtcaacattgttccggtccagacggtaggaataatttgaagaatcggtataagtcgatacattcagctctgataaatctgtattcaatgcacgtactttcttatctaatgctgtatacttggaatgtcctaattctctctgtaaaacagattcaaagtccacttcctgtctcttatatcccggcgtatctgcatttgccaggttgttcatgattgctgtctcacgaagccagctcgcatccgccgctttatctaacacattaatatagtcaaatgcgttcgttgtaaacatacacattctccttccaatttacataattctacagtgatctagtacttattataaagaataaatacaaaaacacaagtatttttttaccatttttgacatatattgtagttttttgttttctgcaacaccacattatgttttcaactacatatataagtgcattatttttccgatttatctgcactgcaagaaaaaaaaggaattctatagtcctctataaaatccctttttctttgtaaatccatttattttatattattttctttcttaatgttctcaagttcatcaaacacaaaatcattcaaaactttaatgtaagttcccttcataccggaagatcttgactcgatgactcccgcactctcaaacttacggagtgcattgacaattacagatcttgtaatgccaacacggtctgcaatcttgcttgctacgaggattccttccttgccgtccatctcttcaaagatatgtgtaatggcttctaactcagaaaatgaaagtgtgctgatcgctgattttacgatctggatctttctggtctcctctgcattctcctcatttacggaacgcatcatctcaagtcctactaccgttgttccatactcacttaaaatgatatcgtcaatatcatacggatcattctcgcggtatacgaataatgttcctaaacgttctcctgcaatatcgattggtgtaatgatcgcagtgtactttttaatatcattcacaaatcccaatgtttcaagattgacattctcttttgtggagaggattccaagcagtcgttcattcaataaaggatcaataaatccgccgacttcatcaacgatcagttcccggatctcctcgacaccgcttgtaagtccggttcccaatacttttccttttttactgataactaagatgttggattttaaaatttctttcaatacatcgcagatatcattaaaaactacttttgaagaattgttgttatgcagcaatttattgatttttcttgttttatctaacaattgaacgctcatttgacagcctcccatgtgtttttgatagtttttgtgacattttgtattttatcacatttattcagaaaattcaatattttcaaattattcttgaatattttctttcttttctgttacatagccgcactgttcatctgcacagacgattttgctgccttttacaaccatatagccgccgcatttcgggcatttttcttctaccggacgtgaccagctcatgaaatcacattccggattattctcacagccgtaatattttctgcccttctttgtctttttcagcacgatctccttgccgcatttcggacatttgatgccgattttttcgaggtaaggttttgtgttgcggcattccgggaagcccgggcatgcaaggaacttgccatgtggtccgtattttacgaccatatttctgccacatacatcacagacaacatcggtcacttcgtcttctatttttactttttccagatctttttcggcagcttccactgctttttccagatccggataaaaattttcaacaaccgttttccaattgacggttccctcgccgacgctgtcgagcaggttttccatgttggctgtaaaatgttcatccactatggaagggaaagattctttcatgatctggtttactacttccccgagctctgtcacataaatgtttttattttcttttacaatataacgtcttgcaaggattgtcgtgatcgtcggagaataagtactcggacgtccgattccaagttcctctaaagtctttaccagagacgcttctgtatagtgtgccggcggctgggtaaaatgctgtttttcttccagcttatcaagagaaagttctgtatgctcatcaatggattttaacaatacattgttctctgctttttcatcttcatcacttgtatacacagacatgaatccgtcgaatgtgaccttggatgcagagactgtgaaacggtaatctcctgccccaatctttacatttgttgtttcatataccgcagatgccatacggctggctgcaaaacgtttccagatcagctggtaaagacggaactggtctctggaaagagaatcttttaccatggcaggagtccggttgatatccgaaggacggatcgcctcgtgcgcatcctgaatcttggcaccggatttttttgagacggtctgtgttgcaagatagttctctccatagttgctgttgatatactcatgtgcctgtgcgtctgcatcctctgagatacggacagagtcagtacgcaggtacgtgatcagaccaacggttccctgacctttcacatccacaccttcgtataactgctgtgcaatcctcatggtcttggaaatcgggaagtttaacgctttagacgcctcctgctgtaaagtactggtggtaaatggaagcggtgcttttttcacacgctctcccttcttcacttccagcacctgaaatttttctttttcgatctctgccattacacgatccatttcttctctggaagtaatgttcatcttattctggctgtctccgtagaactttgcaagcagcggtttcttctctccggcaaccttaagctgtgcatctaatgtccagtattcttctggaataaaggcgttgatctcatcttctctgtcacagatgatacgaagtgcaacagactgcacacgtccggcacttaagccgcgctttacttttgcccagagtaatggactgatcttgtaaccaaccatacggtctaagattcgtcttgcctgctgtgcattcacaagattcatgtcaatatcacgcggctgctttaatgaggcttttactgcgctctgtgtgatctcgttgaagctgatacggtttacatcttttccctctaactttaacgcctgactaagatgccaggaaatcgcttctccctcacggtccgggtcagttgcgagatacactttatctgcttttttcacttctttacgaagcttcgcaaggatatctccttttcctcggatagtaatgtatttcggttcaaaatcatgctccacatccacaccaagctgactttttggcagatcccgcacatgtccgttcgatgctgcaacctcataattttttcccagaaattttttgattgtcttcaccttcgcaggtgattccacgataaccaggtacttagccattcaaactgtctccttattttcagattttgcgtatataataatttttaaaagattctgtaataaagtccttctggatcagtctctgcaaaatgtccgcaagctgtggcatgggaaatcctgtttttttcagaaggtcttccatacttttcggtcgtaaactcaaacaagcatacaccaagctttcatctttttcaagtaataatttgttaaaattttcttgaactgcatccactttcatacacaattcaagatcttttgcaaaatcttccacactatttaaaatgcctgcgccctgccggatcaggttgttgcacccctgacttaaagcgtctgtgctgcgccccggaaccgcataaatatcctttccctgctctaatgcaaagtccgcagtgatcaaagaaccactcctctctttcgcctccacgacgaccaccacatctgagagtgccgagatgatcctgttccgtgccggaaataactgtgcaatcggttctgtgtccggcggatattccgaaatgatcccgcccttcgctaaaatggattcatataatttttggtttgtccgtgggtagcagacattcacgccacatcctaacactgcaaacgtatctccgcccgcctttaatgccccgatatgtccgtatgcgtcaatccctcttgccatgccgctgatcacctctgcgccacagcacgcaagcttttccgcaatccgctctgccattgtctttccgtagtcagaacacattcttgccccgacgattgccacacgctttttggaaaaatcgggcagttttcctttcacatacaagctgtaaggtgcatctacgatgttgcgcagctgttccggatatgagtccatttcataggataaaaatgtggttccgttttcgccaagcttcgcatatttttcttctaaatcccagtccatttttcgttctgtgattgcaagtacctgacggtctgacagtcctgccagcttttctaactgctcttttttcaaaaaatagatttcttccgcagagccagcctgtcctaacaggcggtggatcgtcttacacccgacacccggaatgtttgaaagccagtactgatatttcatagggaatccctccaaaaccgtttgtcaatattgcgatagcagaccgcctcattcagatgggagtccagaattgcttcggaaccgtccatatcagccagcgtccgcgcgacttttaatattttatggtaggatctcgccgtcaggttaagctgtttatagatttttttcatatactgttcctgatttttcgacaaaatacaatattctgcaatccgcgacgccggaatctgactgttatattgaaacatttctttccgaaaacgttctctctggattgcatgcacccggatcacacgttcccttatcgtatccgaacattcctcttttttcctgccgtttagctcctcaaactggatctgtggcgtctccacgcagatatctatgcggtctaaaagcggctggctgacacggttaatatagcgctcaatggaggacgcggtgcacctgcacttctgcatgtccggataataaccgcatttgcacggattcatcgccgcaacaagaataaaatctgccggatattcatacgtaccgttcacacgcaccaaacgcacttctttttcttccattggctgtcttaatatctcgatcgtgttctgcttaaattccggcagttcatccaaaaataatacccctttatgtgccaatgaaatctctccgggttttgggatcagtccgccacccacaagtccctgcgcagtgatcgtatggtgcggacaccggaaagggcgttcctccattaactgctccctcaattgaaatagtcctgacacactgtagatttttgaaagttccatttgctctttcttgtctaagggaggcagaattgtcggaatacgcatggctgtcattgtttttccggcacccggcggtcctatcatcaacagattgtgcattccgctcaccgctacttcacaggcgcgtttcacaaaatgctgtccctggatgtcagcaaaatcaatctgctttgtctccttttttactgccaggtctgtttctttttcaatgtatgtaccgccgtttaaaatatgtatcatttccgcaatacttttcactgcaaaaatcttcatatcttttacaagaagtgcctcggtctggttctctgccggaacaaaacaccgcacgattccgcgctcctttgcctctgccaccatgggtaaaatgccattgaccggtttcacatcgccacttaagctgatctcgcctactaccatggtgtcttttaacgcatcttccggcacgatcccgattgcgcagagcactgccgcgacaaccggaagatcaaacccggatccgctctttttgatatttgccggaataaaattaatggtgatacgctttgccggcagaatgtagcctgtatttttcaatgccgtgcgcacgcgttctttggattccttcacttccggggaaagagaaccgaccatttcaaaaagtggcataccgtctgacacatctgcctccacgtaaaccggaatgctcttgattccctgaataatcgaagttgttactaaactatacaataaaccttcctttctttttttgcataaaaaagatgtattcatcctgcacgctggatattcgcagtgaaccctgcaatgattctgataaaaaagatttcgacatccggcagaagccctcattcatctgccagatgtatgttagtatagcatattttgaggaatttacaaccatatttcttctatattaatagctgtttaaaatgcctgcctgagtttttcaattgcacgcttttcgattcttgagacataggaacgcgaaatgccaagctttcttgcaatctcccgctgcgtcattgtttttttctcataaagaccatatcggtttatgatgatgaacagttccctgccggacaacgtctgtgggattacctcgttcaaacgccttactttccgatcctgctccatgagttccacaatatcctcatcctcgctgaccacaacgtccaaaagctggatctggttgccctctttatctgttccgatcggttcatacagagaaacttcccgcgatgttttcttttttgcccggaagtacatgagaagttcattgtcgatacatcttgccgcataggtagccagtctgcttccataatcctctttataagttccaactgctttgatcagtccaatggttccgattgagatcagatcctccatttcgtcctccgggctctgatatttttttgccacatgggcaaccagacgcatgttgcgctcaatcagctcgtttctcgcctcaaggtcaccatttttcattttctttaagcattcgctttcctgttcccatgtcaggggagataaaaatgttttcaaaacgcaccttaaaagctttcttgatacatcttatgatttgggcaagttgtctgtgcttttccccttttttatttttggtttaaaaaaagtttttagggtgtgaaaagggtgtgaggatttaacagaattttcgaagaactttataatcagcaacttacaaaaataaaggtttacgtggaatgcctgcgttttcttatgcaatattgcaatagctgacaggctaaaaaacaaagattttccggataggcactactgaataaatatttatgatataataagactgctgactgaactatttataatacattttaaggaaaactaccatgaaacgagatttagaatatagaataacaagcgcggatgaaggattaacgatttcggattttttgaagaagcagggattttcccatgcggtgatcgtacagttgaagaagattacggaaggcattgttttaaatgggaaatgggaatatatgaatactaaacttgcacaaggagattgtcttttgatccattttgaagagacagaaggctctgacaatattgttgccaccgattttcctctttcgatctgttatgaggatgaagatattcttgtggtgaataagccggctgatatgccgatccacccttccatgaacaattatgataacacgctcgctaacactgtctgtcattattatgaaaaacaggggattccctatgtgttccgctgcgtcaaccggttagaccgtgacacgaccggacttacgatccttgcaaaacatctgatcagttctgcaattttgaacaatgaagtgtcaattcgcggcatcagccgtgaatatctggcgattgtgaaaggtttcacagaggaaagcggaacgattgacgctccgattggaagaaaagaaggttctacgattgagcggcagatcgatacgcttcacggtgaaactgcgatcacacattacaaacggctcgcctacaaagacggtctttcgctgctctccttaaaattagagaccgggcgcacacaccagatccgtgttcatatgaagtcgatcggtcatcctctgatcggtgattttttatattatcctgattttacaaagataaacagacaggctctgcactcttaccggcttcgctttcatcatccgatcacaaaggagcctctcgtattcactgctcctttaccggaagatatgcaggctcttttttctgaaattcatttataaaatctgctcttttaaactcagcaacggttctttctcataaggaatcttatgggagagaacttcctcacggataaactggtttgtcgccttctcgcccttttttgcaagcatttctaacaaaagttctaacagggctctggtatcatcatgaagcatatgaaattccctgccgttcatgtaatactttaacgcactgtcatcccggtatttttctttctgataatttttcgatgccgccacacggtcaatatacatctccaccacatagttgaccggtattttcattccgcacagtcctttatgcggtccctctttatccggcacgccataatcgatccaatactctaaatggtgcttgtttctgcctttgtgatgcagccacgccgaggaatatccgaccgcctcacgctctgcattgttcgggctcatgttcccctgataatatttacatccaacgataaattcggtcggactgtattttgaaagatcatggagcagtccctgcctgatcagtccaacctgaaaacagcccttcatcaccagcattttatgatgattgatcgtacaaaaatgtttccaaatatgcattttttctaacttcctattttcctaataatactactacagactgcggacgaaccgtaattctgtgctggttttctgccagtttttcaaccggaagaaatgcctgctcctgctctgcggtatccatgattatgtaccatttcttcttttccgcaagctttggaagtgcaagttcattcacaccggtatggaaattgtagccgatataaaccatatcatccggctcacccgaaggctgattcgtgtaatcgccgcagtacataacgccaaatgctcctttttcttccgggaatccggctacccacgcattgtccgaatgatacgacagatccggacagcctttgtgtttgtaatcgttcaaatgcatcggttcctctttgtgaaggatcggatgcgatctgcggaatgcagcaagctttgtcacaaactcctgtaactgctccattcctgcaacatgtttccagttcacccagccaatcttattgtcctgacaataggcattgttatttccctgctgggaatttaacgcttcatctcccgcaagcaaaagaggaaccccctgcgcaaaaaacagcatggaaagcgccatatataagtgtttccggcgcagctccctgacatattttttcgatgtttttccctctgcaccacagttcatgctgaaattataattggaaccatctgcattttcttccccatttgcctcgttatgcttctcacagtacgaaaaaaggtctgcgagcgtaaatccattattgtttgcgacaaaattaacaaacccaacggtcgcattctgtttcttctgctgattgcaaaattcgaacagactgcccccctgatgattcaacagttttcttgcagtataaagatattcctcgttgtatacgaacagatgcgggtaattctctttttctttccagagctgttccggaatatacggataaaaaatcttgctcctgcgcaaaaataaatcctgtgcaatcgcagtgatcggcacattgtctccaatcagatgaaaaccgtctacacggaattccgtcgcccagtaacggagcgcatctaaaatcagattctggttttcctcctgctcaaaatacatctcaagcacacattctatctgattctgatgcagtgtatcgatcaggtgtttcagctcctgcgctacattcttactacagctgtatgacgccttcggggcaaaataaaatccttttgtgtagccccagtagttcactttcggatgctctgcttcagtatcagggagcgtctcattgtaagcagtgttatcctgcggtatgtatcccggaagcttctgttttttcggaatctccatttcctcaaactcatagagcggcataaactccaccgttgtcactccaagtgcttttaagtatggaatctggtcttccaccgccaaaaatgtgccgcgcatcttcccttttttcccggaatccatggaaaaaccacggacatgaagcttgtacatgaacatttcgtttttcggaatttccgggcagcctgcactctgccattcataagcggattcctcgaagcttccgcagatcagatactctttatctgctctttttacatcattccacttttctctgcctgcaatcttcttcgcataggcatccgtgatcacttccccattgatctcataattgtaaaacaggttctttgtcttcaacccttgtatacagattgaacgcactgcccctctgcaaaatgcagccggagcttccactctgtcggcgacatgtaaggatctgtcatataatatgactgcacacacatcctctttttcccctgcaaaagtaaagatcacaccgtcttttacttcctgcaaaccaaattttaagtaatttccttctgtcaccgtataattcattctgccaccagccttgtattttttcaattttcttacgacatataatattattatacctttaaccgataattttgtatagaagaatgtttttgtatttcttttcattttgttctacacaacatgaaaattttatgctagaatcttaatactgaatttacgatagaagggaaatttatgagaatcgtttcaatcaataatctgactcccggtatggtcatcagtgaagatgtctattcttatcagggacagtgtctggcaaaacaaaatacacctgttacgttgcagttgatcgaacatctgaagttctatcagattgcttccgtctgtattttcccggaagatcatgggaaccgcaccgcagacacttccatgacaagacgtatggaaacttattcccagcgtgtccgcaaaagtccggaatttcgaaagttcaagaagaattacacgcaaaaagtttcctttatgaaggaaaatatcaataattttattaccaaagatgaagatttgaacgtagatcagctcttagatgaaaccttaaaccttttcggtgaaaacagtacgacgatctctatgttcgatatgctgcataatatgcggcagattgatgactcgacctatgcacacagtgtcaacgtcgcactgatctgccgtctgatcggcaaatggaagaatttttccgagaaggatatggacactctgactctctgcggactgctgcacgatatcgggaaatccaaaattccaaatgagatcattggaaaacccggaaggcttacagattccgagtacgaagagatcaagaaacacccggtgatcggctacaatctggtcaaaaaccttgacatcgatcagcgtgtcaaaaatgccgttctcttacaccatgaacgattcgatggcaaaggataccctttaggtcttaccggcagcgagattgatgattttacttcaatcgtatccattgcagatgtctatgatgccatgacagcaaaccgctgttaccgcgatgggttatgtccatttgaggtgatcaccattttcgaaaacgaagggctgacacaatttaatccaaaatatatcttgacttttttagaacatattgctaatacttatatcaacaatgaagtattgttaagcgatggttctgccgggaaaatcgttctgatcaatcagaagctcacacgcccgacgatccagcttgacaatggcagctttattaatctggagaatcgtctggatctttatgtccaggctattatctaatactatgaatgagagaggtgccctatggcagagaaaaacaagttcaacaatttagacgatgaagacatgttcgtaacccttgacttagatgacggcagttccatggaatgtcagattcttaccattttcgaggcagacggccgcgattatatcgcacttcttccggtagatgaagaggaacagccaaacgaagacggcgaagtatttatttaccgctactccgaggacgcagaaggaaatccttcccttgagaatatcgaagatgatgatgaatatgagatcgtatccgatcgtttcgatgaacttcttgacgaagcagaatttgaagatttagacgactaaaacacaggaaaccgcccaaatcatagttttgatccgggcggtttccttatttttataaaaatagtttctattctgttattatgattgttctgcaattcacggttatttctgggattcacgcacaaaccgtgaaatatctgcttctttgtggtttaactgctgaacggaatataaatgcagcttcttctttgcgcgcgtcattcccacatagaacatccggcgctcctcctctatctcattgtcgagaaccgcttttttataaggcataatcccttcattcacatctataatgtagacattctcatattccaagccttttgagctgtgaagtgtcgcaagtgccacgctctccggattctggttttgctgcctgtagattttttcaagttccgcggtgtagttttcgatatgttcgaaccagtcgttataggtgtcaaatccttttgcactgttctgcagctcctcaagcacctcgtagagatcgtcgacgttcattctccgataatccgcatattccacgcagaattcgtcatacccgattccgcgtcgtatgtaattgatcgccgcatacggactcatcgaagataacatgtgaatgtcatattctaatctctggatacgctctgccacccacggtttatcctcataaaaccactcccacacatcaaacgccacagtttcttcatctaaggaatccctgctgatataacgctttgggcggttcataattttcaagaaatccttccggtagcggcttcccattgctattttcatgtaagcgatcatgtcctttgcaatccagtgctcataaaggtttggcacattgtccttcatgcggaacggaatattatattctaacaatttttccattaacatctgcggctgtgtattcgtgcgaaaaagaattgcaaaatcttcatatctgccgcctcgttccatatgcgcctgtatatcccatatgatttttgcgatctcatcatgctggcttttaaacaccgcatactcaacaggcgcgcccgcttcctgatttgcctgtatctcttttggaaaacgctctttattacatccgatcaggcgcagagaagcctccacaatttctttctgggaacggtaatttgtgtctaacaaaatctgcgttgcatccgggtaatcgtctttaaaatgcagcataatctctggtcgtgccccacggaaacgatagattgactggtcatcatcccctaccacaaacagattgttttccggtgctgcaagcatttttacgatatcaaactgtattttattaatatcctgaaactcatcaatgagaatgtactgaaacttccgctgccatgccgagaggatgtcttttcgctccctgaaaagttcataagtataaactaacatatcatcaaaatcgatcagtttatgctgatgcagatattcatgatattcgccataaatcctgcggaatatattttccgcacagttcgtggaataataatgttcgatagagactcctgtattttttaccatactgatctctccaagaacagacgagacaaattccgtttcatcctcatactcaagacggtgtttctgcacaagttcacgcatcagcgcatacttttgttcttccctgataatgttgttcgcattataatgatatgcatgctttaaaatgccaaaatagactgcatgaaaagttccaaaagtaaccggataggaaccatttcccataagatttaaaaaacggttcttcatctccaccgcagctgcttttgtaaaagtgatcactaaaatattcgacggattcacgtggtacttcgtgatcaggttttttgtccgctccgtgatgaccgcagtctttccggagccgggacctgccagggtaaggcacggaccattgaaatgcccgattgccttcacctgggaatcattgtatcttttttccataaataccctttatttgctgaggaattcaataccttttttgatacgtgcaatggattcttcttttccgaggatctccattaactcggttgcaccgcccggtgtcatctgttttccggaaacagcggtacggatcggccacatcacataaccgttctttacgcctttttctgcaacatactcacagagcattgcatacagtgcatcattgctgtaatcttcctgtgcctctaatctaggcagaacctctgtcagtacttctaaagaagtctcagcatttgtcttcatcttcttgtgtgtatacattgctacatcatactctggcaatgtttcaaagaaatcaatgtgctctgcgatatctgggaacacttcaattcttgtcttcaccatagctgcgattttcttaagatcaaggtcttttgtaataactgccttgatatatggcaatgctctctcatagaacttgtcaaagtccattgctttgatatactcaccattcatccattttaacttagtgtaatcaaagactgccggtgatttgctgattctgtgataatcaaattctttgatcagctcatctaacgtaaagatctcacggttatcttccgggctccagcctaaaagcgcaatgtagtttacaactgcttctgtcaaaaatccctgctcgatcagatcttcaaaagaagaatgtccgcttctcttggataacttcttgtgattctcgtctgtgatcagtggcagatgaatataaaccggtgatttccagccaaatgcatcatataatctctgatattttggagaagaagaaagatattcatttcctcttactacatgtgtaatattcatagtgtggtcatccacaacgtttgcaaagttataggttggatatccgtctgatttaatgaggatcatatcgtctaactctgcattttccactgtaatatctccgtataactcatcatggaatgtggtagttccctcatttgggatattctggcggataacaaatggttttccggcagcaaggttcgcttccacttcctctttagataaagacaggcagtgtttgtcgtagatcatgatctcttttccctcgacaacttctgtctttaaggtagaaagacgctctttgtcacagaaacagtaatatgcctctcctttttctaccagctcttttgcatatttcatgtagattccggttttcatacgctcactctgcacatatggaccataaccaccgtctttgtccggaccttcatcatggactaagcctgtctctgctaatgtacggtaaataatatctacagcaccttccacaaaacgctcctgatctgtatcctcgatacgaagcatgaagtctccgccttcatgttttgcgatcaaaaactcatataatgcagaacgcaaattaccaacatgcattctacctgttggacttggtgcaaatcttgttctaactttactcataaatctcctctttccggttctgataaacccttaagttttatatacaacagaccgtgtgcaatctgcatggtctgccgttgtaaaaaatagcctgcagctatttttagtcgctacaggctattatataatatatttttcattctgacaagaacggtttatacaccgtctgtttcatttttctggcactttttgcagtttttatccgcacatccactgcatccgatacagttccctctttttttctgcctgcgcatccagatgaatgcaattacaagccagataaataagacaccaaggatgatataatctcctaatttcatgctaaaaagattcctccaacctgatagacgatcagtgcagcaacccatgccaccagacactgtaatacaacgactaaagctgcttttaagctgcttcccatctcacgttttaccgctgcaatcgctgcgacacaaggggtatataataaagtaaacactaaaaagctgaccacggacacaccggagaacatgctgcttaatactgtacttaagttcgaagttgcagttcctgtcagaacacttaaggtactgacgactgcttctttcgccgtaaatccggtgatcagtgctgtggaaactctccagtccgaaaaaccaagcggcgcaaaaacaggtgcgatccatcttccgaccagtgcaagcagactgttactgctgtctgcgacaacattcagtcttgtgtcaaaggtctgtaaaaaccagataatgatcgtagctacaaaaataacggtaaacgctctctggataaaatcttttgccttatcccacataagctggaacacactctttgccgaaggaaaacggtaatttggcagctccatcacgaatgggatcgggtttccgcggaaggccgtgtgatttaacaccagcgcggagataatgccgacgacaatacctgtcgcataaagaagtatcatcacaaatgcttcttttcccgggaaaaaggctgccgcaaacacggtataaatcggtattttggcagaacagctcataaaaggtgtcagcatgatcgtcatatttttatcacgctctgacgaaagggttcgtgttgccataactgcaggtactgtacaaccgaatccaatcagcatcggcacaaagcttctgccggacaaaccgatttttcgcagaggtttatccataacaaaggcgacacgcgccatatatccggaatcttccagaatcgacaggaagaaaaataaaacaacgataatcggcagaaagcttaaaacacttccgactccggcaaacacaccgtcgatcaaaaggctgtgcactaccgggttcatgccataagcagtcagcgcacggtcacacattgcggtaaatgcatcaatcccaagcgtcagaagatcacttaaaaatgccccaatcacattgaacgtcagccagaatattgcaaacatgatcagaagaaacatcgggattgcaagatatttatctgttaaaaccttatcaatcttcgtacttctgatgtgctctttgctctcatggcatttttttacggttttgctgcatactttctcgataaaggtataccgcatgtcagctaaagccgcattgcggtctaagccacagtctttttccatttcttcaatactgtgttccatcatctcaagctcattctgggaaagttcgagctttttgataatgtcctcgtcattctctacgatctttgttgccgcaaaacgtggtgacatgccgatattgactgcatggtcttccacctgatgtgacacggcatgaatacagcggtgcaccggtccctgttcacaaaaatccataactttcgggagaatctttttctttccaacctccacagccgctttgatcaggtcttcaattccttcatcttttgccgcactgatcgggatcaccgggattccaagctcctccgacatctgtttgtaatcaatggagccgccgtttcctctgacttcgtccatcatattcagtgctaacaccattggaatatgcatctctaaaagctgtaaggtcaggtaaagattccgttcaatattggttgcatccacaatattgatgattccatccggtttctcatttaaaataaaatctctcgtcacgatctcctcatttgtataaggacggatcgaatagattcccggcagatccacaacggaacagttttttaccgaacggatctctccaatcttctggtctaccgtcactcctgggaaatttccaacatgctggtttgaacccgtcaactggttaaataacgtggtcttgccacaattctgattgcctgctaatgcgaatatcattcttttgtttcctccaaagacacctcaatcttttttgcatcctccttgcggatcgtcagctcatagccacgaagtctgatctcgatcgggtcgcccatcggtgcaatttttttcacaacaaccttcgtctttgggatcagtcccatatcaaggaaacgacagcgcagagcgccctctccgccaaccgttgtgatgactgcctctgtctcaagtggtaaattatctaatgtcattttatcctccgttaacaagagtctcatcggactcatttatatcctgttattcatatagatttccattttctgtcagttatgctctcctaactttccttagtttaatgcgcaaatttgtgcatgtcaacgcgcttcgcaaagtttttgataatttttctcatttttgtcatttcctacaaaaatgattttttttgcagtcatattatgcacacttttctattttagaacataacttaacttgaaagaaaaagaaaggcaaccaaatttatgcgaaactgtaatgcgcaaaacagaatgaatcctatctgttcaaacgaatcaaaccgcgatatgggaccggaatttgtcgttgcaatggcatacgttccatggcagcagtttggaccattatatgatattgaaaaagggcttatggttggaaccattttccctgaattagataaaccattccttggaaggagggcttttcgaagatgacgaaccaaatgaaccagatgaaccgccaacagcttttcagcctcattaatactgtaagcttcgctgttgacgaccttcttctttttttagacacccatccggatgatgcggaagcgatcaaagccttccatcattactcagatatcaggcgcaacgctctgcaggcctactccgaccagtatggtcctctgaccatcgacactgcaaatccatgcagtcactggaattgggccacagaaccatggccatgggaaggaggatgtaaataatgtggaattacgaaaaacgactgcaatacccgattaatatcacaacaccaaatgccaaaattgcacagatcattatgtcacaatatggcggaccagacggtgaaatgggagcatccatgcgttacctctcccagagatacagcatgccggacagacgtgtatgtggcgttcttacggatattggtacggaggaactggcgcatctggaaatggtcgcaaccatcgtccgccagctcaccaaaggcttaagtgcagaagaacttgaagctgccggatttgcaccttattatgtcgaccataccggtggtatctggccacaggcagcgggcggtattccttttaacgcctgcgaatttcagtccaaaggtgatgccctcactgatctttttgaagatatggcggcagaacagaaagcgcgcaccacttatgacaatattttaaggctggtcaaagaccctgatgtatgtgatccgatccgtttcttaagagagcgtgagatcgtccacttccagcgtttcggtgaagccctgcgcattattcaggatgacctcgacagcaggaatttctatgcattcaacccggagtttgatataccaaactgtcctcgcaattagataaccttaactgttccatcagctttttcattgcactgactggcgcagattaaaaatcagaaagactgtcacacaaactctgctctcatggagttctttgtatgacagtcttttttatatacactatttattcatgccgatcggatactcacagtacatattcgatcatgtatgtcttattcgaactttgcaacctgaagcttgcggatcagttcacgcagattctcagcctcactgctcatctcctgactggcagccgcacattcctcagatgttgcggaattcgtctgtacaacgtcattgatctgctcaattccctcgttgatctgatggatcgctgttgtctgtgtctctaatgtatccgcaatatttccaacctgttctgtgatcgttctggaattatcggctacgtcttctaactgtgttgctgtctgatctgcaatgaccatacctttttctactgctttgacagaagtctcgatcagaaccgcagactcttttgctgcctgtgcactctggtctgcaagtactgttacctgatctgctaccactgcaaatccttttccggcttcgccggctctggctgcctcgatagaagcatttaacgcaagcagatttgtctgggatgcgatctcattgatcgttgcgataatcttatcgatttctttggaagcctcgttgatctcattcatggaatcaaccatctcatgcatcttaccgttgctttctaagattgcatttccaagttctcctacttttccactgatctcttttgcagacttggcgttctgtgccacctgatctgccacgtttgtaacagttgcagtcagttcttccacaactgctgcctgattggtagcgccctcggcaagatcattggagcttgcagccacctgttctgctccttcggacacctcattggatgcactctggatgcccttgactgtctcagccatgctcttttcaaatgccataaaggaatctaagatccctataaaatctcccttccattccacttccggctgcacatcaaaattgccctccgagaacaatttcattgcacgtccgatatcatccacataagatccaagtatgcggatagatttacgcatactatgtgcaagttttccaatctcatcctcagaatgatattctaatgtactgtgcaaattaccctctgtgagttcctttgcaacatcctcgattgcatgcagtggttcgagaatcgaatcaaccacgacattacttattttcttcacaaaaagaattgcaaatatcacacttaagatgatcaccagaattcctgccactgtcatgcagcctgtaaagatcaccgcctgatggcttgccttgtcagtcactgcatctaactttttcccaatagcgactgcattgtccaatgccggcgtacattggttaataatagcatcctcagcgtcctccgtctgtccactcatgatctgttccataatggaatagccgatatttccccaatcagaaagtgcggatgcatattcctgatagagctcgtccgatatgattcctgttgccttcagcgccttcagttctgaatccacctcagcaagctgtgtttctacctgttgcttataactgtcgtaagttgatgtgtcactgtttaatgccatctcacggatatttctcgccgcagaattgacatcgatcctgcaggttttcactgctacatctgcacgttctacattttccacataacgcagcatattccccattaataaacctataacaataagagaaagcacaccggatactatcatcctcaaaatgactctgctgtatccgtaaataagtcttgctttcagctgcatttttccaagtttcttcttcatcctgtgtacctctaatggtataacttccattttcccttcgtaatttattttcgcaaatattttatcacttttccagaaaataacaatccattctttaaaatttatttttttattttttcaactgttcatcttaccggtcatacggtttttcatcacggccggcttaaccggtcaacggagtcgagtatatcctggatctgaggtctcatctccggcatttcttccataaaccttgccacttccgtgtgctgttcttttaagataccggcattgtattccatccggcttcgaagcttctgtctgcgcatcacaaggttatgggtgatctccaccatctccttgtggtcgatcagtgcagctgcctgcggaatccatacccgtgaatcatataaacgatatgcggagagttcccggatcatacggttgttaaaataatcaatatcatcactgttctgttcaaacttctccttctgtttgaccgcatccatatagcattcccagatatattccagttcttttccattgcggacatgatatttttcacatgcataatccactgcatttgtcatattgacacatttgatcttcactttattcaaaagagtgatcgccttatccgcatttgcctttgctctccggctctcggtcccgtcattcatcattttcagatacggaaggcagatgcccagtaccgcaataaaaatcgtaagcatccacgcaagcctcatatccgtctctaatatgatctgcaaaatcaaaaggatcagcgccaccgtcacggaaagtccagccattacatacataaacttctgcatttttaccctgtcatgggaaaggatctcctgatataactgccactctcctttctcgcgctccagatacttcatgtcccgcctgatagtctccagataagcctcgttggactgaaggcgtttgatcgcatttggaatatcactctcctcctgctgcatctgtgcaaactgcacatccgcgatcttcttctctgtgtgaatcagatcataccgcgttttatttaaggcaacaatattggatgcgatatctgtgatcggctttttttcttcctctgtcagtccttccagagtctggatatcattcagataagaagtgaccactttgtattctgccttttcatcctcgatttctttcgtcgtctcgatcatctgctctaaacgttcaatgacataatgctccaccttatgtggattctccctgtccttttcattcagaatgccttcattcagttcatcaaatttattttccagtgtcttttctttttttcttcttttaaaaaaaaacatatgctcatcccttataatttacaactttttttatacgcttctgaccagtccgaaatccgctccgaaagtggttcatccgcttccatatttccggaagcctcttttagaagctgttctgtttctgcctgcagttttaacacttcttcgctcttaaatacctgattccattcatcggacatctttcggaattcctcatcggaaatatgaaattcatccttgtatttttttaaaatatcattcttttttgccagccggcatgcagtcatgcacgctgtcagtgactcccggttctggttcagccgataggcatttaagaaacatgctgccgcctcatcgaataaaaacagtctggcatacgcagttccaagattgtgcctgatatttccttccagtaccggattgttcttacattcttcctgcattccaagcagattccggtattcctgaatggctctgacatatttttcactatccatatagcggtctgcacgtattttgcaacattcaaatacggatttattctgcatttcctgcaaaacggaaaggatatggcgaatggatgtctccgaacagtatccgcagcttcttaaaatcagttctgtaaaatcagacaggctctccctctcatgcaacgcctccctaagagactgcgccagcttcttatcacaaagctcctgttccacccagagacagagttcctcactcataaaatctgcctcgatcagatacagatgattctcaatatagtaacataattcttccaacgaatacacattgagtgagatattatcaatatagtatggcatagcagcaattggatgactgcacaaaatcaattctcccatattcccactcctttttataatgacatcgtatattcccatgccagctctgaacttttcacaatctcgccaaagccaagatcacggatttttatttttacctgcgaatcagacaacggttttgcactgatacggagtcttgttgtcttcggtttccggtccggcagatccgataattccagtttttcgatctttgcatccctgcagtgtggcagctggagccagaaatcgatctccttgtcatcctccaacagcacttcacattcgccagaagcctcataccagttatctcctgcgctgatcagcgaaaagaactcgctttttccgccattttttactttcaggctgacatttagcttcatctcgttgtcacccatgtaaacatactgccacggcgtcttttgttctctcaccattgccgcataacaggcacctttggaataaagattttttccaatgaacgctctccgtcccttacacatataggagagtgacattttcatccagtcaccgtcaaatccatcgcctaccagatagacagcggaactgatatgcccatgaaaactgtcgagcagaattttataaaaggactcatcccggtgcatccggtctagcgcatgtttttcctctgtgatcgtcacgatctgcggaatggtttttgcatcgcggacaacggtgcagcatttcacctcatccccacggcagtcaaacaaaaatatatcatgcagccacagctcctgcttctggttataggcaaaataataaaagctttccttccggtccataaggatcagtttgctgcggtttagtccgagttcttctgcaaccttcgtaaataattctgttatatttcttgacagcgcatccactgtgaccaccagacagtccggcagaccgggatttcccagacggcttgcaaaaagaatcagttttttgatgtataaaacaaaaagatcttccttctcaaacaccgcgttttcaatggttacctgtttcttttcgatggcaccgctaagcagatgatcgatgacttcctcattctgtaaaagcgccattttttttgcttcctcgccgataaaccactgaccgatgccacgcttctttacgagtgccaccggaatctggtatatctcgcttccggcgatcatactcagcgtttccggttctctcatgccgcttttataatagctgatgacggcattgtcatcgtccatatcaattccaatataataacactgctccgccaccttatgtgccatccttcccaaagtttttataataattgaaacagcttcttcgctgcataatccatgctctcatattttcgcatactctcagaaagcattgcctcatcctgtgcggcatatgcaaacatcacactgttgatcagttcgtaccggctctggtccttgtccccataaatatcctgactggctatctggtagctctccattaccttccactcaccattctgtttttccgatacataataagacactgcttccccaaaaagcagaacgaacatcttcacataaatgccgtcatagacctctgacaattcttccttatgatattccccgccattcagactgaaattcagcaatacatgctgatccggttttgtatggtactctaagaaaaatttatcatataaatgatatttttttatcatagcatccccaaactttttgtagaaagcaaaataaatattctttccggtatacaccagcaaaaggtcgtccacgattttccggtctgcagcatccgaaagtgccgtttccgataaacgttttaacaatccgagcagacaggcatcattcaatgtttcacctgcaagataacgtttccggatctgtggaaatacatgttccggtatcatcatatcgttgaccagataacaatgggaaaaataggataaatacgccatgcagactaattccctgccgcctccggcgaggtaactgtcataaatccggtcaatctcttccacgtaatctgtggaatacagcatttgcgtgataatgcgctcctcgagatcaaacgtatcgatttcaaattctcccgccgccttccagacagccgccatctgctttgttgctccctgaaagaatttgcacagatagatcaggatcacatcattatactttccatgtgcgaaacagctctgcgccattccaagcaggtaatcatcatcttcgaacgaatgttctgtgatctcataactgcacagttccacacatgcccggcttccaagtctgtcatatccaaaatgctgtaccagcccgaatgcgcgttcatactggtgtgtctcaatgagcatttcttccacataacattgattttcctgcgacattccccggatatccacctctgccagatacggttcaagcacgagcatttccccttttttctggtaaaacctgataatctccggaatcagatatgccttgtattcctcactgatacgttccgactgggtaagcatacggaaatatcttccgtcttccatggaaaaatcatcacacccatttttgttatcaaaataatacaaaagatatggtaattccccgggtgctaattccatgcacttttccagataattttccggctgcaaaagcgcatcatcctgataatcatccgtaaaacaatttccgtctgtatcgcacaaaatcaccgtatactctctggtatatgctttaaaataaccacatccgtttgtcagtgtgattatctgcggttcctttaatgccttttgtaaaatatatgcccttgcgatcttacgattctcacagcttaatttatgtacaaacaggatctccgccaccttgtgcgccagctccgtatttaagatactgaccggaaggatctccctgtaaatgaccgccagattgtcatccatgtgacctgcttccatttgcgtgattgcaaactgttccatattcctgcgatatttatggtacacatccggctgcttgtccttcgcagcaatgatattcacatacaaaactgccatatgacgatacgataatccactgttatattgaaaatacaactgaatcatcttcggaatcgctgtgacctcattctgatccatggagatcaaaaacgcctcatacagattcgtgatccgaatttcactgtcaattccacgctcgtaccagatatggtactttggtgcaaactgctgaccgcggatcagataagtacagatcgccgcaaccatttcctcggaaggatctgcctcatagcacttctccaaaaccggataccattttttctgatactctctctgctccggcaaaagattccgcacctgcaatgcaatatccttagagattgcgttctgttttgccgcccactttaaaatttttaaggtaaaatcatttaacccggacaaaagatatgggtcctgccagatcagataatacgcctccagataaaggtacgggctgctatttccttgtgaaatccactgttcaattgccttccaccttctcgagctgtcgcggtaatattcatccctcacaaacaaaagaatccaaaacagcatggaattatccggataatggtgaaaaatctgttcgatctcctctgtcagacgatcaacgtaggattcctcccgctccattaacgtgcataaatacagataatatccccagacaggcgttgtccggtcaaaacattccctcttaaaatctgttaagatccagcttgcttcctgcttctggcggtttaataaaagcgcctgtgccttcatcagacgatacattgcatcttccggctctaaaatcgccagatgatctaaaagttccacagagcgctttgaccacactccggtaacgatccgtttcaaacggtaatcaatataaagctgcatcagttctgcgcgtgctcgttctgcctcacggtgatccgacacattttcttcttcgcgcatttctttctgcgacgcagtaacggtataaacaaatgactgctccggaagttcaaaacaaagccttccaaaattcctgccggcatgcattttatccgcatcaatataataatcaaaaaaacaggtgcttccgataaaatcattctctgtgattaattgtttccctggaatcaaaaagtctgcatccgaagcaacccggatacgcacagctccccactgtggtttctggatttctaactgttccttccgctgtccgcttactccgtaaaatgctttttccgtttcttcgaaagcaggctctactttcttcttgtgatgcgtggcagtcagaaatgtttccacgatcaacggcgactgtggctgggttctaagtccttcgtaaaggcgtctgtctttctcctctttgatcagatttttaaaattgctggaataaaataaacgatatgcctcgtcatagctttcctttgcaagctttgcaaaatcattcagattcttaatcttacccagagaggaatccgcatataatctggaaacagacacaacaaaagaaaggttatattctccctggttacatacaataaaaaactcccctttttgaatatccccctcgatcagcccttcactgtgaaactgataccggatacgcacttcctccccctcaaactgtggggtaagacattccatgcgcggatttgaagaataaatgataccacgcatctttacctgattcgtgcttgttatgacaaagctgcctgtctcatcttttccctccaatatctctaattctatcttctcggtagaaagcgatagtttcggaccattgttatcgaattttccatttgcaagctgttgtatccttttccgcaattcgacacctgctcttatctatttttattgcttttttttacgcaatagctataataaattataaactaatttggaggagtaatcaatgataaaacacaaagaccatttccatggaagtgatttagagaaaatagaagaaatctatggtatcaaaaaagaagaaatcgtaagtttttcagcgaacgtaaacccgcttggtgtctcgcccctgttacggacaaccttagcagacaagatcgatgccattaccacttatcctgacagggaatacacctcgctccgcaaatgcattgccgcatactgcggtaccgattatgaaaatgtcattgtcggaaacggttctacagagctgatctcccttttcattcagatcgaacatccgaaaaaagcaatgatcatcggtcctacttattccgaatatgagcgtgagatctcactcggcggcggaacaacactttattatccgctgcgtgaaaaagatgacttcaaacttgatgtcaaagattttatcgcacacttaaatgaaaatatcgaccttttggtcatctgcaatccaaacaatccgacttcttcctgcatcacaagcgctgatatgcgtcacattttagatgcctgcaaggaatatgatatttatgtcatggtggatgaaacttacgtggaatttgcagaaaacatggctgaaattgattctgttccactgacaaactactacaacaacattgtcattctccgcggaacctcaaagttttttgcagcaccgggacttcgccttggttacgccattaccggaaaccgtgacctcatcaaatcgatcaacaccagaaagaatccatggacgatcaactcacttgcagttgttgccggggaaacaatgttttcagacaccgcttacatcaaagaaaccaaagagctcattaccagagaacgggctcgcatgtatcaggcattttctgaaagtcctgattacaaggtatataaaccaagcggaaactttatgttagtccgtatcctgcgtgacggactcacctcacaggatctgtttgaccgtgcaatccgtgagaaaatgatgatccgtgactgttccaccttcccattcttagataataagtacattcgtttctgtatcatgaatccggaagataacgacagattgctgcattgcctgttaaataacgaataagcttaacgttccgccagaagctgcttgatcttgtcctgctcgatctcctgctgcatctggcggacttttgcgtcctgctgcaatgcaactaagattctccgtatatcctccggtgaaaacattgcaatcgcttttgacagatcttcgatattgtccctgttcactttcaggcagcctccattctctaactgcactgtaatgacattcttttcatcactcatgtcgccaagtgtgatcgcattattctcataatcacagaaaaatgacacgccattataagtgatcactccatcctccgccagataagagtatggagcaatgtcctcaccatctaaatgcttctgtatggttaatttctccgcctgtggctttttatactgctctgccattttcattttctcataaaactgctggatttccttttccttatcgcgtttttcaaaccgctctttctgctcctgctttacctcggtcagatattcatccattttctgaatgatttttttccattcatcctccgtaaaagaattgccgccaattgttgtagaatcctgcgattgtccgttctgtaaccgattctggatttctgtttttcgtttctgcaactctgcaattgcctgtattctggttgtctttgttacatttgccatactcataactctcctccacacccatgtcaaactctgctgtttttacaatatgatgtatttccgatatgcactttaaatctgattttcttttatcaatgccaaaaggacgacatatgattcttttctctctcaaatcatatgccgtcctggtcatttttctcttacatccaatgtactattatatatatcgtatggttttgtgaattcttaagtctctactctaataattccggaatctttttggaacatgcaactgctaacgctcccggtccaatgtgacaggatacacttaaggataacggattcagcacaatctccatacccgggaattctgcctcgacctcttttttgaacgcttccgcatcttccagattatgtgtataagccatctccagatatatattctttccctccggatcattaaaacgatgatcaaaatcgttgcgcatggcgtcaatcatcattttcttcgcctgttttacggttcttgcctttgcaaacgaatctaacttctcaccctgaatctgcaataccggttttaactttaacaacgttccaagtgctgcagccgccggtgtgattcttccaccttttttcaggtaatagagtgtgtctaccataatataaatggaggattccatcttctcacgctctaagatctctttgatttctttcgcactgtatcctttctccgcaagttcctttgcatctaatacagactgtctctgtgtgactgaaatcctctggttattgaccacctgcactctgccgtcataatcctgtgataacatgattgctgtctcgcaggaaccacttagtccggaagacattggaatatgaacaatctcatcatactcctttaaaagttcgtcccatgtgtctgtcacattaccgacaagcggcatggaagttgaaatattcgcatcctcggaaagcttctggtaaaaatcttcctgtgtcagatcaatatcttcataataggtctggtcgttgataaaaaagggcatcggcatgactgctacaccatattccttcgcttcagcctgtgtaattccactgttactgtctgtcacaattgctactttgctcatcgggtctgttcctcctataatgtctcagaacgctctttgatgttcttcttaaaattgatcacttcgtgctcgtactcttcgttcataaactcagagtggatcataaagtctgcggatgcacggttatttgcgattggaatatcataaacctgcgcaatacgaagtaaagctttcacgtccggatcatgtggctgtgctgtcaatggatcagaaaagaaaacgacaaaatcaattcttccctctacgatcttcgcaccgatctgctggtcaccaccgagaggaccgctgttgtatcctttcaccggaagtcctgtcttatctgtgatcattcttgctgttgttccggttccgcacaggaaatgctgtgtcagaatatccttattctgttcacaccagtcaatcagatctgcctttttattatcatgcgcaatcagcgcaatattcttctgttttccaattgtaagtgtgatgtaattatcgttcatgtgtttctcctttgtctgttatttgtgcctgtgatctttcataacacacaaataaattgtaccacaattttttaaattgcaccacacaaaaatatgcaatacaatatacgctctgcggacattctgttgtcatggatcagaggattccctgtaatgccgcaatcttcccatcgaggatcattttgataaatgccgtatcgcggatgatccacggatctttttctatcttaatattcgtatcgtaaatctcctgcggtgttgcccattttaaataatatccttttgcaatctcgctctttgtcagatgaatcggtatctgttcccctgtctcctcacagtagtaaaaaagggaatgacagataaacttttttgtatcgtcaaaaatatctttccggacttctaaaatctctccaagttccactgccttctcctgcaaaataaaaagtcctgtttcctcttttacctctcttgcaagtgcctgcacataagtctcccctttttccatgccgccgcccggaatcttatattccccctctttactgcactgcatagcgatcttcccgtcccgcacaataatcccgcgtatggtatatttatcaaaaacactggtagtatcttcataattctgtgcatcaaattttttaagaagctccatgggttatcccttctttcgtatattacttaaatgctacgttatcttttcgtacattttatcacaccacatatccatacgcaattgggagcacgaaaaagaccatagccaaaagttatcattacgattcttctggctatggtctttttctttatcttatgatgaaatcaccggattacatcattcccattcccgggttacctgctggcattgcaggagcgtcttctttgatatttgcaacaacagattctgttgtaagtaaagtcgatgctacggaagttgcattctgtaatgcacttcttgtaacttttactggatcaaggattccgttttcaaccatatctacatactcttctgtagctgcgttgaagcctgttccaagtgcagactcttttactttgttaataataactgcgccctctaatcctgcatttgcagaaatgtagtacagtggagcttccagtgcttttaagattacttttgcaccagtcttctcgtcaccttccaatgtatctgctaatttggcaacttctttggaagcatggatgtatgcagatccaccacctgcgataataccttcttctacggctgctcttgtagcattcaaagcatcttccatacggagttttgcttctttcatctctgtctctgtagctgcaccaacacggataactgctacgccgcctgccattttagcaagtctttcctgtaatttttctttatcaaattcagatgttgtctcttcaatctgtgcacggatctgtttgattcttccctgaatggcgtctttgtcaccagcgccatctacaatgattgtgttctctttctgaacttttacagattttgcacgaccaagctgatccattgtggtgtcttttaactcaagaccaagatcagagctgattacctgaccgcctgtaaggattgcgatatcctctaacatagcttttcttctgtcaccatatcccggtgctttgacagctacaacattgaatgtaccacgtaatttgtttacgattaaggttgttaaagcttcgccttctacatcctcagcaatgattaataattttgcaccgctctgaacgatctgctctaacagaggaagaatctcctgaatgttgctgatcttcttgtctgtgatcaggatgtatggatcatctaatgtagcttccattttatccatatcagagcacatatatgcggataaataaccacggtcaaactgcataccttctacaaggtcaagttcggtctgcattgtcttagattcttcaattgtgataactccgtcgttggaaactttttccattgcatctgcaaccatgttaccaacttcctcgtcaccagcagaaattgctgcaacttttgcaatctggtctttgccgtttactttggaagacattgctttcaaagattcaactgctttatcagttgctttcttcataccacggcgaaggatgattgggttagctcctgcttcgaggttcttcataccttcctggatcattgcctgtgctaaaactgtagcggttgttgtaccatcaccggcaacatcatttgtcttggttgcaacttcttttactaactgtgctcccatgttctcgaaagcatcttctaactcgatctcttttgcgattgtcacaccatcgtttgtgatgagtggagcgccataggatttatccaaaacaacgtttcttccttttggtcctaatgtaactcttactgtatttgctaatttatcaacgcctgcacctaatgctgctctggcttctgatccgtatttaatttcttttgccatgactttttacctctttctattattttctttcaataaatatatcattattctacaactgcaagaatatcattctgttttacaatgatgtactcttcgccgtctaattttacttctgttcctgcgtatttggaataaataaccttctgacctgcttttacctgcatggtaacttcttttccgtcaaccattccgccaggacctactgcgataacttcagcttcctgtggtttctcctgtgcactgcttgtaagaataattcctgattttgtagtttcctctgcttcacactgtttcaaaactactctgtcactcaatggtactaatttcatgataattcctccattcatatcgattcttttcttttttgcttttgatattgtagaaaggatctttccactttctattatcatgtgttattagcactcatttagtttgagtgctaaccgatagtcatataatatgtttttcgccctgaatctgcaactggatttatagacgtttgttactgtatttttctattttttctcttaaatactctttttttctcatttttttatatcatattactttttcgctgatttcatactttttttagatttgtcggaaacaaataaattgtttgcttcctccattttatctaaaaccgcctgttttacggattttttcactgtctgatttccggttttccataacatgcggagtgcttttgagaaaagttcctgtgtctccggtgaaagcttgctctttgccttcatgagttcctgcacttttttccatttgctgttgtaaaaatcatccactgtgtagattttagcgtcctctagcatagaaaaaactgtatctacgatttcctcccgctgctcttttgtcaactggaaaatccattttttcattgtctcgtcgagcaaaatactctgtggtgcgacttcatccacatacacaaaatgattgccaagcacttcccaggacattgcatcatgctgctggatgccgctctccgaacttcttacaacctcaaatttttcctgatgttccaaaagcatgccgacaatacttgattccggcaggattgtcttaatcttcggcagcattctctgatactctttgctctcgatcatttcctcattaaaccccggaccgtcattgctgtatactttcacgatccgcttctggattgaccgatcacattttacagatgcatacacagacagatttcctcccttggaatgtccgccgaccctgattttcttccagtcgtcatgcactatctgattcagataatcgacagctttcaactgcccgggtgtctcggacagatagcccatgttaaaattttcccgccagccgatgatcgtattgtctgttccactgaaagatacataaatactcttgtcatccaaccggacacataccacagaaaactgtgactgttcctctttgctgatgtcgttgatatagccaaacaactgcgcattacagaaacgttctgtctgtgccatcttctctaacacaaatgctgctgttttcgtcatagacacacgctccatgatctcttttctgtcatgtgccgcaaaaaagtgttcacatgcttcttttaccgtgatcgtcccttcttctcccggtgccggaacgattcccgcaaattccacatacacaagctgcgccagaatgagattgtctacctcgttgaaaggtgcttcccggaatgtcagatcgccacgccagtccagataatccattaaatttgccatactgcctccttgttttttgatgaaaaaaagtgaaccctctggtgcacagagagcgtattctcccttaaatcaatccgtaatgtttcaatccatgccagataccgtccttgtctacagattgtgtcacatattcggctgttttcttcactttctctgttccatttcccattgcaacgctgtgtgccacatagatgagcatctctaaatcattggcactgtctccaaatgcatacgtgttttcgtgtgggattcccagtatctcacacacttttttgattcctgttgccttggaaatgccggacggattaatctctaagattccctcctcatgaatgactacattgaagtctttccccatatcctgtacaaactgctctatatttgcattttttgcaatgcagctcattttatttatctggattttactgtgatcatccggtatattcatcaaatgctctcctaattctttgcgcaaatggatcacatatggatcgtccagaaaatcattttcattcacatagacatattccggtccctctagtactactggcatgcgatgcttttccaatacctctaacgcatgtgttacctgcgcttctgtgagcagaaactgatagactgtctccttatgaaaatcaatatgcgccccgcaggaagcaaccacgccgtcgaatccaatcccgagcaaatccgggctttgtatattcgaacggcttcgcccactacagataaacgcatagtgtccgttttcccgaagcttcctaattgctgaaacggtgctctgcggtatctgcattttataattccacaaagttccgtctatatcaaaaaatactgcttttttcattgttctgtcctttacttttacatttttctcacatcagtgattccattaaagtatatctgatttctttctttttgcatagtacatcattttgtaaacaacaatttctgatgtgctgccggattcgcagactcgttgttttgcagataatatagaacaaagagttgcaatgcaactctttgcgcgctgatgcgcgcaagctttagcttgcataattcttctgcgcatcagtcgcatcctcgcggagcgttttacgttataggaagattgcatcgcaattttctataacgcaaaaaaagaccgccagacaaagaacgtgcatatttacgttctaaatctgacagcctttctatgatttttgcttatatgattgtaaaagacaatttacattattccaacatgcaatcttagtctgatatgtatcaaacagatcttagttgttgatcaatttatcttcttcgttgttccaactgtaaagtttacggatctctttgccaacctgctctgatggatgttcagcagctttctttctcatagctttgaaatgaacctgacgtcctgctggtgacatatccaataaaaagtcctttgcaaaagtaccatcctgaatatcggaaagaatctgtttcatagctttcttcgtatcctctgtgatgatcttaggtcctgtgatgtaatcaccgtactctgccgtgttggagatagaatatctcattccttcgaaacctgactggtagatcaggtctacgatcagtttcatctcatggatacactcgaagtatgcatttctaggatcatatcctgcttcgcataatgtttcaaaaccagcctgcattaatgcacacacaccaccgcaaagaactgcctgctcaccaaaaaggtcagtttctgtctctgttctgaatgttgtctctaagacaccggctcttgctccaccgataccaagtgcatatgcaagtgcaagatcctgtgcttttccggttgcatcctgttcaacagcgatcagacaaggtgttccctttcctgcctgatactcagaacgtacggtatgtcccggagcttttggtgcgatcatggtaacatcaacgtctgctggtggaacgatacatccaaaatgaatattgaatccatgagcaaacattaacatattacccggctctaagtttggctcgatatctttcttatacatatctgcctgtttttcatcattgatcaggatcatgatgatatctgctttcttagctgcctctgcagttgtatatacttcaaatccctgtttctcagcctttgcccaggatttgcttccctcataaagaccaatgataacatggcatccggaatcctttaagtttaatgcatgtgcatgtccctgactaccatatccaatgatagcgattgtctttccatccaataatgagagattacaatcttcctgataaaaaatttttgctgccatttttaatcctccttcaaatagctattccataatttttacatcggctgttcctcttgacagtcctgtaataccggtgcgcgctaactccagtatgtcatatccctgtaacagatccagaaaagcctcaagcttatcctgatgacctgtaagttcaatcaccatggaatcatttgtaacatctacgatcttcccatggaaaatctctgtcacattaagaatcggctggcgttcggtgtcttttgcacgaatcttaactaaaatgagttctcttgtcactgaagaacccggctccaacttcttgatatcaaccacatcttctaacttggcaagctgtttttcaatctgctctaatatctgctcgtccccacttgctacaatggtaatcctcgtataacgcggatctgcagtcacaccggaagaaaaactgtcaatgttatatcctcttcggctgaataatccagaaatatggcttgtaacacccggattgttctcaactaagagcgataatacctgtcttctcataatgaaaacctcttccttgtaaagtcttttgcgctttacagttttactcactcatatttaagttaaataatatcaatatcatatttctttgtcaacgtctgatgcgatatttgcctatatattttgtgcatgactattataacctgtgtgactatttgtatagtgtttacataatttttattcatatatgtttataaaatcaattatgaagaaagggtatttaatcatggctttctcctgttcgcaaagctcacaaaggaaatcatattttatctgtacgatttttctttcatttacactaagaataacttgtgaaagtcccctgatacatactaactttacgattaggaggcagttataatatctgcttttggcattacctatgcaatcaaaaaatagcgtacaaatgataaacttgaatttacagcaccattttccataacaatgatgaaataaatggttgaaggaagaacataataagtgctacagatacacatattatgtaaaagtcactcatttttgaatttgaaaagattcgcttcgtaaaattatcagttatcctatgtacaataaaatatccaattatagtaccaacagtatttgtaataatatcgtttatatcactggttctaaaagtaaaaatctgtgatatttcaattaaacttgtaactataaatcccattaaggcaatatttttaatgtttctaaatttatcccacaatatcggcaaaaagaaaccaaatggaacaaataaaagtatattcaaacaagcattaatgaaatccgaaaccatatccaaaaacgggataacgttcactgcaaaatcaattttcagagatgctatattagggaagcctacaagtgctaagactgcagtaaaataaaacccaaataccatataaataatagttcgtttccagctatgaaaacataacttgttatatatgcaccaaataggaattataaaaacagctgccgcaacaatttcgataagtgcactatatattctatacatatttttctacctccacaacttccgattgtataacagcatcttatcataacatatatgtaacttgtcaatttatatatcgtaaattaggcagattttgtggctacattcataacctaaagcagggcagatataagagtacatgcacaagtcagtcaccgcatagagaaaaagaaaaatcgtacaaacaaatatgatttcctttgtgagctttgcgaacaggaacatcatatttcgtttgtacgattttctttttaataactattcagattgacttgtgagggaaaactaatctctgcccttcactacctataacatagacacaaaatccgcctgcattatgttagttaaaatctggttttacagcataactccagatttttccttgctctcctccaagatatgattgaactttttgaatggtgctgcaaaaacaagtcccacaagcagagaaataatcgtataggacattaaaattgccagatcaacccaataatcatcctgatacataccagccacagcctctttcatggctcccattgcatacttgaatggctggaactgatagaaggtctggaatactttcggcagtgtctcaatcgggaatgtacatccagctcctgcaacctgaattaccatgataatgattgcaagtccctcaccgatattaccaagtgacgccgtcaatgcatacattaaaaagccgaacacaaaactactgcaggatgctgccagccaaaataaaaacggatgtgcgcactcaatcccgataaagtacagatcacccaataccgtgatcagcgcctgaacctgggcgatcaggaagaatgtgatatatcttccaaaaaactgctggtacggtttcgcatttttaaaggaaggctcaatttctacatgcgtatgtataatagccaccagaatcaatccgcctacccagagtgccagcacggtatagaatggcgccatggaagaaccataagtatccacttcataaatcgcctctgtttcgatctcaaccggagatgccataaagcttccgatttcctccggatcatgcgctaacaacttggataaaatctcgtagccttcttcccctttcatctgattcaaacgttccagacgttccccgatcacctgacgcatatctgtgatcgcatcttttgttcccgagagactgatattcgcagatgctaatgttgcagaaagctgtgacagatttccattcgaagtatccaatgcctttgcgatagacccaagcgcattgctgataccaccaaacgttgctgataatcctttggaaattgttccaagggatgccagaccattgcctgtcacgctctgcagatttcccatagcagtctgtccgcttgagatagcactcttcatatccggataaaccgctgcaaactgatttgttgttgatgcagcatttcctgataccgacatcagagaatccagtaaattctcatacactgctaattgagcgtcagcttcccctaattttccaatcagcatatcaatcacattagaagagcctgtttcttcctctaataccgaggaatctaacaatccgtcagaagcttccatgcagctcttgatcagcgtggaaataaactgtgtgtttacagtctgctgaactgctgtttttgccttatctgtaatttttggcgcaatagcatttttcttttcattggtataataggtgatctccggatgttccatttcatctgcaagaaaacttaccatatccgctgtaaaatcttccggcataataagtgctgcataataatcaccactgtaaacaccgtcgattgcttcctctgttgtgtccgtgaacacccagccgatcgtggtattcgcttctaacccttcgatcacggttgcacccatattaaattctgtgtcgtcaatcgtaattcccttgtcatctgacgcaaccgcaactttaatattggatgttgcatccggtccgtatgggctccagttggataaaatattaaaccacgcatataaacaaggaaggatagataaaccgatcaccatgacaaccgctacaacatttgtttttaatcttttaaaatccgacataaaaatccgaaaaatgttcaacatatctaatcttccttatccttctttttgtcttttttcttttctttcttcttattcttctgctcagatgctgtatcctcggaagtctcctccgaactgctgtcttcctctacctcatcctctttttcctctaacagagcctcgtccggcatcacttctgaatcgccgaagtattttgccagaattgcacgatccgcagcaatcttacgttccatctctgccagcctgctgtcaatgctgctgtttggcagtaacgtatcaatttttccgtcttctttaatgccaagttctgtcagacgctcctgcagagtatagtccatatattccacataaatcaggtatccagaaattgtaaacaaggaaacaatccaaagtactaagaacaccacctttgaactgtccatggaaaacatcagcattaaaaatatcaacggaatcagaataacacagcggattccccaacggattttcttctgatttcgcagatgttcctcattctgatattccatgatcctgcgataagattcttcataatttgtttccattgatcttctccttacatcattttcgtatcttccatacgttcctcaacgaagtggttcatcttcataaacggttttctcacaaataaaccaatgatcagcgcagcaattgcaaatactgcaagctggctcatatacatccagtaatcattttcatacataccaccaatggtttcacgcatcgcattgatcgcatatgggaatgggaaatatttgtaaatgttctgattaaactgtggcaggatctcaatcggataagttccacttgaacctgcgatctggattaccattacaacgactacaaacgcttttccgacatcgccaaaggaaacggtcaatgtgtaaatcagcagattaaatgcgaagcttgtaaatgccgccacaatgtaaaacataaatggttccagacattgtactttaaggagatagagatctccaatgacaacgattgctgcctgtaactgtcctaacacaaagaacagtaaaaatcttccaaaatatctctggtaagcttttgcacctgcaaacttctggtcttccacctgaactttgaccagggcgaccaaaataactgcacctacccagagtgcaagtattgtatagaacggagttaccgaagatccataattttcaaccggatatacacgttctgtattgatagtcacaggagccgcgaaaaattcgcccataacctccggatccgtcgataaaatccggataaactgatcatacttttctccgtcttccaccgcatttaattctgataaaattgtatttaaatcttctttggcagaactgatgatttcctttagagtattaaagcttccattggaactgcttacggtatttccaagactgctcaatgccactcctgttcctgcaagtcccttgttcatgctgtttaaggaagcaaccatattattataagctgctgaaatgcttgctttcatagttgcaacatctgcctggagctgtttttccacgattggcataaccgcatcgatcagatttgcagccgctttgatcgcagtgtgatcgccagtaatgacattgttaagatcacccatctgactctgtaaaacaccctgcacagcatttgttgtctgttcaatactgtctaacaatttaataaaatcatctttattactgctgtccggaatcagatcactctgtaaaagctgttttaacagttcaatctgctgtgtggaatttgatacgttatttgctgcgttggcaatttcttccgctgtcgggagttcttttgccaaagtggtattgacttcctgcaaatgtgtatggatattctgatatacctgatccatctgcgactgtaaagtcgtgatcgtctgctgtgcatctgtttttgctttatttacctgtgcaacaccgttattcaatttaccggaagcaccggaaacctctccacttgcagttttcagattagaagcaagtgttgcattgcaggacatcagattatcaatcgttacaagatagtcatccagatttttatctacagaatccagcttatcaataattttcttgatatactgtgtcttttgtgcatcatcggcaagttcattcatgctttccatgacagtagccactgcaacatttacaaattcctcattaatgcttgactccaaagttccctttgctgtatctgtgatcttcgatgcaatcggatttttcttttcattttcataatatgtaacagaaggatgtaccagatcattgtctgcaaatccgtacatgctctcactgaagttctcaccaatgacaattgcagcataatattctccgctgtaaacaccgtcgatcgcttcatcttcggttttcacgaactgccagccaatcttgtcgttctctttcaaattatctaagaccgtgtcacccatgacaacaaattcgccatcactcttggtatatccctcatccacggaaacaaccgcaaccggaatcgttcctgtattactgtatggatcccagttggaataaatattaaaccatgcatacagggacggaagtacacagattgcaagtgcgatcaaaagtgccagcttatttcgccatagtcccttcacatcattcttgaaaatcctaaaaatagtcctcattctctcgtactcctgaaataaatctcatttttggtttcaacattttttagcacaatttgttattgaaacacattttttccataaaacagatattattataacgttatttcatagattttgaaacatacaatttcctttttttgtaattatttgctatgtgtttgtgaaactcggatttgcatatgtaaattaatttaaaatgaacaagagcaatgaaaacatataacgttactatgctttcactgctcctgtctatttccatactataatttcatccttctgcaagctgggcagctatctgtttttattgataataagtaagatcaaagtaggtaattccacacgcatcatttacttcaaaatcaatgtatttattataatcctcagaattataggtatagctgttatactcatcagattcatatacatcttcgcattcgcccataatacctactgctgtctgctcatctgttccgatcataagaccgccactgacggacatcaccgggaatttatctacctgatcaaatccatagcaggtatctaaagaaaatgcataaatctcacattctgtaatatcttttgctgcatcatcaagattcacaaaacctacttttactgttacatccggataatccgggttctctaactcaatggtctcataaatctgatccccagaattcatcacgtaaccatcttcgtaaccataatccgctatatcaaacgtccatccgttcgctgcgatctcgctgtatgcaaatggaagggaatactcatgtccgtcaaagaaaaacgacatatcctcccatgttccgtccattggctctgcatctacaaccggtctgtcctcggaagtatccggaagtgttgcggcttcggaatcatgattgaagatgtcctcagcctgatctccgtcatcatccgctgcataataatcgcttgtcacgcctgtgtctattttactggagccactcgaacttccaccgaccagcgttgaaaccgtcaatgcaataattgtgaagatcaacataattccaaatataataagacccataaataactgtcctcttgcccagtttttgcggattgcgtcttttggattttttccgatcagccagataatatacataacaatatttacaatcggaatgttcaccaataaataagtcagcatccactgtccgacactcatctgcggcacaagttcctgctgattttccatcccggactgatactgtggctgattgttatagccatatgtattttgcgtaccgccgtaactgttttgtgtacctccatagttgttttcactgccgtatgaattctgggtatttccgtatgtggtctgcgtttcaccatatgcagtctgggtgcttccgtaaatgttctggcttgtgccatattcattctgagaattttcgttctgttcgttaaaattatcactcataactcttttctcctcctacgtgtatataacgtttacaactttatcgtagcagattacaaaagtatatgcaatagaaagattttactatgaatcataagatacgcttataaatccgttttttctctctgtatctcatattctggattcaacaacaaacatttacttctgaaaaaatcttttattttatcagaattatccgtctcataaaattcaactaacaattccttaaaatgatcgatttcatcatacggaatggaaaaaataccaatatcattctccatcataattttattgcacatcaactgtgccacccttttgtttccatccagaaacatctgtgttcttgcaacaaagcagaacatttcaagtgcagcttctaacttgtcagtcatttgattgattcgatccaaggtttcaacgatcattccttcatgtggaagtaccatgctcttttcatattcacaatgaataaaacttcatctcgtcttgtctgaaccggtagattagagaggattttctctgtgtttggaaaggttgttccaagtccctcaattcctgcacttttccagatagaatcaactaattgccgctttccaagggaaatagataaattattcatcatcctacctctataatagaaaagccatgggaaaaacccatagcttctctagtaagtagaatgtgataaatatcaactgatatttatcacattctattaatattcaattatattgcaacttttattccaaacactgtttagaatttaccagctttgtgagcttcctctacacttacagctacagcgacagtagcacctaccattgggttatttcccataccgataagtcccatcatctctacgtgagctggtacggaagaagatcctgcgaactgtgcatcagagtgcatacgtcccattgtatctgtcataccgtaagaagctggacctgcagccatgttatctgggtgaagtgtacgtcctgtaccaccgccggatgctacggagaagtatttcttgccctgctcgatacattctttcttgtatgtacctgctactggatgctggaaacgtgttgggtttgtagagttacctgtgatagatacacctacgttctcatgatgcatgattgcaacaccttcctgaacatcatcagcaccgtaacattttacagttgcacgaagtccgttagaatatggtttctcatatacaacgtttaattttgcttctttgtaatcatactgtgtctcaacgaatgtaaatccattgatacgggaaatgatctgtgcagcgtcttttcctaaaccgtttaagataactcttaatggtttctgacgtactttgtttgctttctcggcgataccgatcgcaccttcagcagcagcgaaagactcatgtcctgctaagaagcagaagcactctgtctcttcctctaataacattttaccaaggttaccatgtcctaaacctacttttctgtggtcagcaacagaacctgggatacagaatgcctgaagaccttcaccgattgctgcagcagcatcagcggctcttgtacatccttttttaattgcgattgcagcacctacagtgtaagcccagcaagcgttctcaaaacagataggctggattttctttacctgatcataaacatcaagtccagcatcttttgtaattttttcagcttcttcgatagagctgataccatagctgtttaatacagcattgatctggtcaattcttctttcatatccttcaaataatgccattttcgttcgtctcctttccttactcttctcttgggtcgatgatcttaacagcatctgctacacgaccatactgtccttttgctttttcccatgctgtgttagggtcatcaccttttttgatgaagtcagtcatttttccaagagaaacgaactgatatccgataacttcgttgttctcgtcaagagcgatacctgttacatagccttctgccatttcaaggtaacgaacacctttttcttttgttgcgtacattgtaccaacctgggaacgaagtccttttcctaaatcttcaagaccagcacctactgctaatccgtcatcagagaatgcactctgtgtacgtccgtaaacgatctgtaagaataattctctcatagctgtgttgatcgcatcacaaactaagtctgtattcaaagcttccaggattgtttttccctgtaaaacttctgctgccatagctgcagaatgagtcataccggaacatccgattgtctcaaccaaagcttcttcaatgataccattctttacatttaatgaaagcttacaggcaccctgctgtggtgcacaccagcctacaccgtgtgtaaatcctgagatatcttcaatttttttagagtgaacccattttccttcttctggaattggagctggttcatgttttgcgccttttgctactgggcacatgttttcgacttccttagtgtaaatcattttaagtctcctttcacatataaatagatatgtcatctgctaaacattgttagatgcttaacatactccaaacattttcgcacatttttttcattttcacaagtagaaaccataaaatttatgtacttttttgtaaaatctgaaaaaattactgtttctcaacgatctcgtttttattcttataaatagagtttgcaggaacgacaccgcgtaccatcgacaacggataaacattgctgtggcttccgatcaccgtaccaggatttaagactgaattacatcctacttccacaaaatctcctaacattgcgccgaatttcttcaaaccggttgcgatttcttcgcctgtggatttatctttaactactactaacgtcttatctgatttaacgtttgaagtaatagaacctgcacccatatgggatttgtatcctaaaatggagtctcctacataattgtaatgcggcacctgtacagagttgaaaataatatcattctttaattctgtagaatttccgacaacagaaccttttccaacgatcgcacttcctctgataaatgcacaatggcgtacttctgcttcctcgtcaatgatcagcggtccatttaagcaggctgtcggtgcaacctttgcactttttgccacccagatatcttcaccgcatttttcaaatttttccggatctaaggtcggtcctaattttttaataaactcgctgattccttttaatgcttcccacggataagtaaactgctctaaatattctttcgcaattgtctcattcagatcatataaattgcttatttttgcgttttccatttccttttccttcctgcttgaaaacttctgtaaatattccacagcatcatcattccgcatctttattcttccaacacttcatgattgcctgtgctttttcattataaacacataaaactgattattcaagaaaaaagagccacagactttgctgtgactctctctcattcttactgttcacacatacctcgttccagtaacttatcgttctttattacttctgttctctcaatgtgaactgtcttacaaggttatcaagtgtttcagcctgtgctgacaattcttcactggtagcagaagtttcctgtgccatagcggagttggactgaacaacttcggaaatctggttgactccctgctctgcctgctccatagccgttgcctgagactgtgagttttcacttaaggacttggatgtatctgcaatatcattaattcctttgatcacttcgtctaatgtctctgaaaccaaagcaaccgctttatttccttcttcgacgtcatggatagaaccctcgatcagttctcttgtggaaactgccgaagccgcactctgttctgcaagtttacggatctggtcagcaacaactgcaaatccctttcctgcctcacctgcacgtgctgcctcgatggaagcattcaaagataacaggtttgtctggcttgcgatatcctccagttcggaaatgatattctcaatcttcatggaagactcgctgatacgctgcatagcttccaccattgcgtgcatctgctcacggctgtgatccgcatcatctgcatattttcttgcatcagcatgggacttttgaagattctctgctgtgtgttctacgttggcagtgatatcagcaatggttgcctgaagctcttcgactgccccggcctgttccgtagcgccttctgccagagactgtgcagcctctgccatattgccggaacctaaggatacctgttctgccgtctcctctacctgacggagagattcattgatcttgcggttcatgttgcgtaatccgacaagaagatcattgaattttccggtgtatatttcttcatgctctgttgcgatagcaaaattaccatctgccatctcatttaagagttttccgctgtcagagatgatcatattcagcttatccgccatctgtcttgctgtctcgatcatttctgcaacttcgtccttcgcatcatgctctgggaattcactgtcaagatccccttccgcaaatgttttcagacgttctgatatagctgtcagtggttttgaaattccgtctgcgatctgatttccaaatcttctgccaatcataatggaaagaattatcactgcgatcataacgatcacaacaataatctccatcactgccaggattgcttccagctgctcccccttctggacattgatatccatcaggttcttcagatcattgtaaacaacctcatacagcggcttgagttctttatttgcccggttctgtgcttccttgctgccggcttcatctgtcgtggctccgatttcgatcagttcatcggaaagatcccaatatccatccagatcggcaaggatctgattgtacgcatctcttccggcttttgtcaccatgctcttttcgacttctgcaaggtatgtattaaatgaatcctgttttacgtaataatcctcttttaattctttgataatactttcctcgtcataaccgattgcacccctcagatcactctgcgcacctgtaaacactatcattgccttcccgatatctccctgggagaatccataattggtaagcgcatggttatacatccttgtcataatcaataacgcaccgattcctacgattgctgagatacttgcaataaaaataacctgcatgtaactcttagacagcttttcgcgaatttttaaatcctggccctttttcatcctcatgtctccttcgtatttatttttgtacgcacatatctcaatgtaccgtaccactgtatataagcataaccctgtacccgacaaaaatcaataaattttgtcaaattttttacattttatttacgcttcaaacatagtttgtttttcctgattctgtgcgctttcagctggctttgcattttccaacaccacgttttctcccggattgtcaaaatcaaaactgatcctgtcgtcctcaaatttcaggcaggtatcaaacacattccccgcttttgaagtaaatccggttatttttttctttgtctttccggtctcaaaaagctcctgcatcgtcgcttcatctaacgtaacttttgcaactgtatgtgctgccttaaacccacattcacattcataataccattgggacttcttcataaactgtccgcatttcggacatcttaatgtcgtgtcgaccggttttggtttttccgggaaatcgaacgtcaccgttccctccggtgtgagtttcagcggtgcgtcaaacatcatgccagtctttgcgacaaagcctttgatcacttctgtttttccacgaaggagaagttctttgacctgggcttcttttaattttaccccggcgatttttccaatggcaaatttgcagctctccggatcatctttcgagtagttcgcacatccatagccaaatggtgtctggatgatctcgccaccacagatcggacatttcacatctttgatcttcaccggctctaaatccgtaaaatcaaattttaaacctgtgactttgccaccctcatcgcggtttaatgccactcttgcgtcaaactttttcccggttttcgacttaaaaccgcggattgttccggttcttccgtttgtgagcaattcttttacctgtgattctgtcagggatttttctgccattttaccgatagaaaaacgacagctctccggatcatctttcgaataattcgcacatccgaatccaaacggtgtctgcacgatctctcctccgcagagcggacagaccacatcttttactttttttgcctcgacatgttcaaaatcgaatttaatgactgttttgccattttcgtccttctccatacagaggcaggcatcgaatttttttccggtcttggacttaaaaccgcggattgtctctgtccttccgttcgtgatcagctcggtaagctgggatacattcagacttttctctgcaatttttcccactgagaaatcgcagccgtcttctttttcccggtcaaaatgaatgcatcggaacccataagcagtcgctgcaatatctccgccgcacgacgggcacttgattccttccactatctgtggctcatttgctgagaaatcaaacgtgatattcactctgccttcctcgtccttttgcaaaaccagtgacgctgggaattttttcttagactttgcgacaaagccttccagcacatccgttctcccttttgtgatcagatttttaaattcctcctcggaaagatcacgccctgcaatcgctccgacggaaaatttacatccggttccgtcctttttataattgccgcacccgtagccaaatggtgttgtttccaactcgcctccgcacacaggacaggcgattccaagttttttcttcgctgcgatccctcttgcacctttcccggtcagaggctggatctgtgccacaagctgtgcggtcaggttccgctccaccatgtttaatgtctcttttcggatgaaatcctcaagtttttcccggtaatcttccatgatcaccgttccacgcgtgattccgtcaagtcctttttcccacgaagcagtcattttcggattcaaaagtgccgggacggtcatatttacgacttcataaaccatctcgcccaacacctccggcgacagaatctgtgattttttattcaagtgcaggtaaccgatgcgcaccagttttttgatgatctctgcgcgggtggcagaagttccgattccagagcctttgatctgtgcacgcagttcttcatcctcgatcagctgtccggcattttccatcgcaagcaccatcgaaccggaagtgtagcgtttcggtggcttcgtgcttccctcttttagagaataaccattgaccggcagtttctgccccttcgtcaactgatctgccagttccagaagccccggactatccgtctcctcattatcctctttgttgctgccttctttttcttcttcctgttttcttcctgcaatctctaaaaatcccggcgcctttaatgcttttgcaccggcaaaaagtttttcctctccgacggccaccacaagttttaccgtctgatattctgctgccggataaaaaatacttaagaaacggcggacgatcagatcatacacacttctctgcagttcatttaaagaacgcagctctgtgagctgtccggtcggaatgatcgcataatgatccgtgatcttcgaatcatccgtatactgcgtttttgcaatattataatgaagtccttccttcatgatacgctccacatacccctgcaccggctcatagcctttcagtctgctgatattttttccgatttcttttgccactgccgttgagagaacacgcgcatccgttcttggataagtagtcagttttttctcatagaggtcctgtgccacctgcaatgtctcatccggactgattttaaagcgcttcgaacactcggcctgcagttctgcaaggttaaaaagaagtggtgcctttttccgtgaagttccgcgctcaatggaggagacaaccgctgttttcccggaaagttctgcaattaagttttccgcagactcctgctttttaaatccgttttccttatacaataatggagattcaaagtatttagaaccttctaccgctttccactccgcctcgatgttcgcatccgtgaaacttccgactacacggtaaaatggtgtttccacaaaattgcggatctcacgctctcttatcacaaccataccgagcacgcaggtcatgacacgtccgactgcaattgcagtatagcttctcgtccctgccgcatcatttaaaagatttccatatttcacagacattgcacgggaaaaattgattcccatcgcgtaatcctcaatggtcctcataatgccggattttccgaggtttgcataatccgacatcggctttgcttcgcggataccccgtttgatttcctcctctgtctgggaatcgatccagacgcgcagctctttcatcccctcgcggacaccgccgtacatacggatgttttcctcaatggtctgtccttcttttccggcatcccctgcccagtagacagtatcaatatcttcgcggtgcagcattttatgtactacatcatactgtttgctgaccgccgggatcacatcatatttgtactcttttggaaggaaaggaagatcctctaacttccattttttatacttttcatcatatacctcgggataaaccatctccacaagatgaccgacacaccaggtaatgacgtaatcactattttctatgtatccgtcatttctgcctgatacaccaagaatccgtgcgaactcctgcgcaacacttggtttctccgttataattaatgactttgccaaaaaaattcctccaacttctgtaattcttacttcttttctaaataagaagttttataattcattcatatcgaccagaatatatctggtatcctcttctgcaagctgtctgatctcttctgaaaaaccttttgctgaaaacagaaagaaatactttgcatcaatttttgcctgcttcatactctttaacaattcttctttcatctccatggtaaattccggctgattccagttacagtatccgacaatattctcccgcacagagttctgtgcaataatgtcgatatttccttcttttccaatccatgttcccatcttactgatcttcattggcagttttccaatcagattcaaaagtcctacatattccatgcatacttccttgaaatagcgttccagatattcgtcgattcccgatgtgatatacgcatcgtagaactgttccggactcatcatataaagttcggaaagatgtggatacacaaaacggaaccagaaattcacataattatccttaatacgatagacaccttttttcgtgttttcccatccacctgtctcaaaagaggtctccttttccacaatatgaaaagttccgagatttttcatgtacacactgatttttgcacgtgaataaccggtttttaaatgaagttcatttaacttatcataaccgcttgcaatataataaagaatcgtctcatacacagacagttcccgcagttctgccgcaatcagctgctctgccgcccggtgcatataaccattccggtttaaaatatttctgcatatattggttttcagatccacgcgctgatcccagtggttgatatagcctgcaacgccgccgatcacaccgtaagttctgatacagtcactgacctgatactgtggaaatgcacgtaccacctctaagaaattcaaaggattaatcttaatctttccatcaattcttttgctctgctcaccgagtgttgcaggcatctcctgttccacccatgcaaccgaagaactgcacaaaaggatcaacaccggtcccggataaagacgtttcattcttaatttttcaatgctctccataaaagaggcatctttttttgcaatcaattgaaattcatcaatcacaaccacaagttttgacgcatcaccacttttgatccggttgaaaaattcgtcatagctgtgctttgtaatattcgccgaaaacttctgccgaatctctgcctccatctgatttctctgttcctgtcccgatgcctgtctgctgcgataataaaagtacttcttgtctgaaagaaacgctttcaataactgttctttctcagaatctgtccgtccatacaacacatagagctgatttccactcttcccataaattgtctcaagttcttttaaaatggatgtcttcgctaccataagaaacctcccatttctgtctgtttgttcgttttccctcaatgtagtaaaaattatatcattttttaatttttccgacaacccggttcttgccatataaaaagatacctaagaaatgaccggaacagcattttactattccggtcatttctttacagtccacacatctgtgatacggactttttaaatcgctatgatattctctcttatttctttgtgatgtaaccctgtgcttttaacagttctgcgcagagcactgcaccacctgctgcacctctgacagtattgtgggataaacctacaaacttccagtcataaacagtgtcctctctcagacgtccaacagagattcccataccgttctcaaagttgacatctaacgcgatctgcggtctgttgtcctcctctaagtactggatgaactgctttggagcacttggaagatttaattcctgtggaactccactgtagtttctcaatgcttcgatcaactgttctttggttggtttctttttgaattttacaaatacggctgcggtatgtccatttaataccggaacacggatacactggcatgtgataaccggagatgctgcaggaacgatctctttcttctcatcatcaatgtgtccccagatccggagcggctctttctcggatttttcttcctcaccaccgatgtatggaatgatatttccaaccatttccggccagtctttgaacgtttttcctgcaccggaaatcgcctgataagtcgttgccactacttcgtatggttcaaactctttccatgcggtgagaacaggcgcataagactggatggagcagtttggttttacagcaacgaaaccgcgctttgtgccaagtctttctctctgatatttgatcacttccatatgttccggattgatctccggtacgaccatcggcacatccggtgtccatctgtgtgcactgttgttggatacaaccggtgtctctgtcttagcgtattcttcctcgatctttttgatctcttcttttgtcatgtctactgctgagaaaacaaaatctacttctgccgcaactttttctacttcgttgacgttcatgacaacgatcttttttactgcttccggcattggagtatccattttccaacgatcaccaactgcctcttcatatgtcttaccggcacttcttgggctggctgcgatcgttgtcacctcaaaccacggatgattctccaacagagagatgaatctctgtcctaccatacctgttccaccaagaatacctacttttaacttttcactcattgcctaatctcctcgtctttccctgttcgttcgaagaaccgtccctgttaccggctctttccattcctgacaatcgaatgtctgcggatcgtatgttctattgtttgtccgtctatcgcgaacagatgtcgttatagtgaatatattatgctatttttctcaaaaaagcaatggtctattttgtaaaaaaatgtcatctttccgggtattctttgtgcattttttacaataacgttttaccgtgttaaagtttcctttttccaatcctctgcaagatatgccttttctgcctcgatcactttctccatggctgcctttcccggcgccccgatcgtcaatcggttattcacgcatgtctccatggaaatctcttcatatatatcttcctcaaataccggacagatagcctttaactcgtctaaactcatatcgtcgatcgcaattccgcgttcaatacagtagagaacgatttttccgataatgccgtgcgcatcacggaatggaacaccatgttttaccagataatctgctgcatcggttgcattggtaaatccgttgtttgcggacagacgcattttacccttattaaacttcatggttgcgagcattccggtaaataatgcaatacatcctttgacggtatccatggcatcaaaagacagttctttgtcctcctgcatgtccttgttgtaggcaagcgggattcccttcatcgtggtaagtaatgacattaaagcgccataaacacgtccggtcttgccgcgcacaagctctgcgatatccgggttcttcttctgaggcataatactgcttccggtactgtaagcatcgtcaatctcgacaaactgatattcattggagttccagataatgatctcctcggaaaatctgctcaaatgcatcatgatggttgcacacgcggacaaaaactcgatcaggtaatcgcggtcggaaacaccgtccatactgtttaacgtcggaccataaaaacctaacagttccgccgtgtactcacgatccaatggataggttgttcctgctaatgcaccggaaccgagcggacagtaattcattctctcataaatatcgtgcagtcttaagcggtcgcgcttaaacatctcaaaatatgctcccatatggtgcgccagtgtgattggctgagccttctgcagatgggtaaatcccggcatgatcgtctcggtatttgcctccatgatcttaaggatcgtctctaataattcttttaaaagatcatctgtatgtaacagttcgtctcttgtatacaatctcatatccagtgcgacctgatcgttacggcttcttccggtatgcagtttctttccggtatctccgaggcggtcgatcagatttgcctccacaaaactgtggatatcctcgtattcggatgtgatctctaacttgccactctctacttcctcacggatttcttttaatgtgcggacaatatcgtctctctcctgctccgtcagaatgccctgttttgcaagcattgtcacgtgcgcaatactgccttcgatatcctgtttataaaacttctgatcaaatgtaatggacgcattaaaattatagactaactggtctgtctcctttgtaaagcgtcctccccacaactgtgccatggtgttttcctccttatgataaagttttttcctgattcttttctgcgatctccctgtccctctgatttttcgaaaaaacacatccgcagtaatactgccggtacataccgtattgttcggatagttccacagaacgcttatatccattcttcttcttaaaatcagagttcagataggcaactccgtattcggctgccagggcatcgcctatctcatttattttttctgcatttttcaaagggctgattgataatgttgtcgtaaaataatccatctgcatattctttgcgagttctgccgattcccgcagtctcaattcatagcaacggaaacagcgctccccgccctccggacaatcctctaaacctcttgccatctcataaaagcgctctttctcataagctccttccacaaaagaaatcggatattttaccggaagtctttcgataaacctctgctgctcttttacccgcttttcatattcttcctctggataaatattcggattatagtaaaaaacagtgattttgaaataattcgaaagatattctaagcagtaggaactgcacggcgcacagcaactgtgcaataacagcgtcggtacgcggttttcccgctcgtttttttcaatggtttgttctaaaactttttgataatttaccttgttcatattaacgaattttactttaaagtgcaagctaaaagctgttttgctttttcctcccatgtatatttatacttaaattctgtataagcattgttctgaatctccctgcagagtgcacggtttgaaagaagttccgccgcataatctgacaatgtgtgaatgtcttttaacgagtacattaagacgtgctccctatcctttaatatgcggtcaagatatgggtttttgtctgttaagacgacacagtgatttgccatgcccgcaaaaatacggtcgtgcgccccatgattaaaaaatggcgaaacattcagcatcacatccgcatgcgcgattttttcaaaagacaatccaaaaactaccggtttttctctcgtcacataagcttcgttgcatctttcatacttttcccatccctcgccgactaagcgaaccggaatttttgcactcacaagttcatccaccgccgccttgcggaaataatcgcggataaatgcatccaccggatacatggcattcataaaaagtgcaaacttatcatccggtaattcctcgctgtgcgcctttaaaagctctcggaatcccgcctccatcggaagaattggatcttcgatgcgcatttcgatcaattccttcatatacgttttcaaaggctccggagagagactgaccatttcataaatgctgtccggatcatcataggttcccatgaaaagaacagtgtctgtctccgtctttccgcctccggttactgcctctgttgccccaagcggcatggtaagtgtctgcttcacccttttataataccgctttacataagcctcctgcgcctcatccagaaaaatcccattcagatttttcagattggcattcagacaattgtaatggaacaacggatgatccagaatgtaatcaaaaaacggaccgtctatcttatctaaaaccggcgttccgtcctcctccaccatccttgtgatcgtggaattaaaatctaacagcagacggtattttttcccataaagtggctgaaaaacagcatcgagatcatcctgctcatcaaattcacagacgctcacgtcaaatcccagtttttcaaaagcatctgccatctggtttgcaaaaaaactgctcgactgatagcagatctctctggaactgaaaactatgattttttctttttcctgcatagtgtattcctttttcagaaaaaggctgccgccgggaaatcacttccacaatgcagcagccttgcttcttctactctctgataaattttaatgataaaattccaactacataaaccagtgcgcataacaccataaaaaccagttttccacagattgcaccagctatgatctgtaccagcacgaccagaccatgcagccagattggaacatcgtgcagacatactgcgatccctgcctctaacacgatgatcaggcacaccggaactaccgggatcttaagtgcaagaatactcaccagaattgccgcaagagcaattacgatcactccaaaaaggagcagatactgtttattatcctcataaaaagcaagtaccggattctgctgtctgtgtctgaacttcttcttggacttcttcgcatccgtgcgtctgaaatcctccactacaacgttctcctgcttattctcattctctgccatttaaaaaacctccaaaatattacgaaacagaatgtttccgtttcttactgatcactcaaaacataaatgtgaactcattataacaattccctttcaaaagaacaagtaattgtggaaatattcttttttttcctatataatgacttagacttcatacacttctatgcagcagaccaatacgtgccacgctgttaataaagtgaatgatgatattttgaaataacgaaggtacttaaatatgaacaatacaaactgggtttccgtgtggggaaatgcggtatcaatcgccgaacatcatccggaagcttatgcaaaagacattacattacgttatcctgtatatattccttttgacggagatgcactccgtttcacgcttgacaattattgcggaaaggaagctgtcacgatcacaaaagccacagttgcagtcgcagcttctcctgtctacgaaaaaatgccactgtcctgcccatgtaaaaatgagacgctctgtgacatcactttttctggaaatgaatctgtgacgattggcgcacatcagactgccctcagtgatccaattgctttccctgtcaaaaagggaatgacactctcgatcagtctttattttgctgattttaccttaatgcagtcctctgttcttgtgaccggaccactttccaaaggatttttctcccttggagatcagacgcatggtaaaagtctgccgatgaatgatacaaagactacaaactggttttattttctgagtaacatcgaactgatgacttccgaagaaaaccatacggtcatctgctatggagattcaatcaccgcgggcgcatggccggattatctcacactgcttgcaagagaaaacccggacaaccacacggcatttatcagacgtgcaaccagcggttcccgcgtactgcgccagtatgagtgcattacctatgattcctatgggttaaatgggataaaccgctttccacatgagattccgactaccggggctgataccgtgattatccaacagggaattaacgacattatccatccggtcggcattgaaacaaatccgttccgcccgatgagtgacctgccgactgcaaaggaactgattgacggttaccgctattacacagaggaagcgaagaaattacatttaaaagtctacatgggcactctgctgccgatctttggctggcgcacttacgcaaccttccgcgatgatctacgcaatgagttgaatgcgtggattcgttctgcgaaagaaatcgacggatgtatcgactttgatctggcactgcgcggaagcgagaatccatccgcattccgggaaggcttcgacagcggcgatcacctgcacccgagcagcaaagcctatcaggcgatggcagaatgtgcttatgaggttttgcagcggtaaatgcgtggaatactttacattttgtgaatgcgattatgaacaaatacagaaaacagaaaacccagtaaaatcaagattccttgaatttactgggttttctcaattaagccaataaggggactcgaacccctgacccacgcattacgaatgcgttgctctaccaactgagccatattggcatgacaaatcagtcacgaaaattattatatcggattttgaaaaaaatgcaactctttttttcagaaatttataataaattttacacgaacactattgacattttatcatttcattataaaatgttttgtagtttgtttattattagtaaactttttgtaaccattcagtatttttcaggattggaggcatgcggtatggatattgggaaacgaatgaaagaacttcgtattcaatatggactgacgcagcaggaacttgccgaccgttcggagcttaccaagggatttatctcccaactggaacgcaatcagaacacaccgtcgatcggaacactgctcgatatcattcagtgtctcggaacaacaccggcagaattttttaccgatgaagaaccggaacagatcgtatttaaaaatgaagactttttcacgaaggtgaatgaagacaagcataatatcattgaatgggttgttccaaatgcccagaaagattccatggaacccgtcagattaaccttgaaagcaggtggatcttccgacattatgcagccccattccggtgaagagttcggctacctgatcaagggaaccgtcaaaatatattatggtggaaaaagccatgtgctgcacgctggcgaatccttttacctgaaagccgacaaaaagcattacatagaaaatcccggcagccgtgatgccgtattgatctgggtatctactccaccaagcttttagatcacgatcggtggaattcagaaaggaattatgttatgagtaaaaagctaatcaattttgtcgatatttccaagtcttatggaaacaatctggtacttgatgaattaaatttatatatccgcgagaatgagtttatcacgctcctaggtccatcagggtgtggaaaaacaacaacgctccgtattttaggcggttttgagacacctgataagggacaggtcatcttcgatggtgtcgacattaccagcctgcctccaaataaaagaaatctgaatactgttttccagaaatacgctttattcccacatatgtcgattgcagaaaatatcgcatttggattaaagatcaataaaaaaagcaaagaatatatcaacgataagatcaaatatgcattaaaattagtcaatcttgacggttttgagaatcgttccatcgactccttaagcggtggtcagcagcagcgaattgccattgcccgcgcgattgtcaacgaaccgaaggttcttctcttagatgagccgctcggcgcgctcgatttaaaactgcgtcaggatatgcagtatgagctgatccgtctgaaaaatgaacttggcattaccttcgtctatgtcacacatgaccaggaagaagcgcttaccatgtccgacacgatcgttgttatgaaccagggctatatccagcagattggtacaccggagatgatctataatgaaccgaccaatgcgtttgttgccgactttatcggcgacagcaatatcattgacggtgtcatgatccaggataaggtcgttgagatccttggggttaagattccatgtgtggatgaaggctttggaaacaacactcctgtcgacgttgtcatccgtccggaagatattgagatcgtcgaaccggaaaaaggatttatggagggggatatcacctctgtgattttcaaaggtgttcattatgaaattgagatcatggcaaatggtttcgagtggctggttcacaccacactgctccacaatgtaggcgaacatgttggaatcaacgtcattcctttcaatatccagatcatgaacaaaccggaatctgaggatgaggaggccgtagagatcgatgcgtaaattaggaagacaattatttgccggtccgtatctcatatggatcatcggctttatcctccttccgctggcaatgatcatttattatgcattcaccacctccggaggaacttttacttttgaaaacgtggctgctatcgcagatcctgtgcatgtaaaatccattcttttatccttaaagcttggcattatctgcacggttgtctgtctgctgttagcctaccctcttgccatgatcttaaatggcttaaaaattaaacaacagggatttgttgttttcatcttcattttaccaatgtggatgaacttcatgctccgtatccttgcatggcgtttgcttttatcgaacaacggaatcgtaaatgcaattttccagtttttgggatttggcacgatcaaaatgctcaatacacagactgcggttgtattcggtatggtttacgacttccttccatttatgatcctgccaatttataactccatggcacggatcaaaaatgatgtcattgaggctgcgaaagacctcggtgcgagcaatgccattattttatttaagatcatcattccgctgaccttatccggcattatcagcggcattatcatggtctttgttcctgcgctgacttccttcgtcatctccgacctgttaggcggtggaaaagtgcttctgattggaaatgtcatcgaacaggagttcatgcagggaacgaactggaacttaggctccggtctttccgttgtattaatgatctttgtcatcgcaagcatggctctaatgaatattttcgataaagacggcggaggtactgcggtatggtaaaaaaagctgcgtcaagaatttatcttgcacttatatttttatttttatatcttccgattctggtgttgatcgtgttatccttcaacaactccaaatcccgtgttatatggggtggatttaccttaaaatggtacgcagaatgttttaaaaacgaaacgatcacaaatgcttttgcgacaacgatccagatcacactcgctgccgcagtcatctccacactgcttggaactctggctgcgatcggtatcagtgctatgaaaaaaaagaacaaagcaatcatgttaggtgctactaacattcctcttttaaatgcggatatcgtgaccggaatcgcaatgatgcttttatttgtaaaattcatgaacctcggttttgtcacggttctgatcgcacatattacttttgacatcccttatgtcatcttaaatgtgcttccaaaattaaaccaggcaaaccgttatacctacgaagccgccttagacctcggtgccacaccgctttatgcctttttcaggattacatggcctgagatcaaatccggcgttttctccggttttttaatggcagtcacaatgtcgttagatgatttttccattaccttctttaccaagggagccggcgtaaacacactctccaccatgctgtatacagagcttcgtaagggaatccgcccggaattatatgcgctgtccaccattttatttatgatcgcattcctgcttcttctcgtaatgaaccaccgttccgagggaaaagcggtaaaacaggtgatttaggaggctgttatgaaaaaaaattttctgacattttttactttatgcctcatggcaagtgtgctctcctcctgtggaaaaagcacatcttctgctgagactgcaaaaaaagacgacaatactttagtaattttaaattatggaaaatacattgatgattccgttctcgaccagtttgaaaaagagaccggaattaaagtgaagttagaggaatatgaaagcccggaagaaatgtataccaagttttctgccggctcgatcaattacgatctcgtatgtacttctgactatatggtggaacgcctgatcaatgaggatcaggtattggagattaattttgacaattttgaatattacaaaaatatcgatcctgccattatcgaagcatccagaatttttgacccggaaaacaaatattccatgccctatttttacggaacacttggcatcctttacaacacaactatggtgccggatgacgaagtcacaacctggaatgttctctgggatgaaaaatacaaagaccgtatcattatgcagaactctgtacgtgacagcttcactcctgcgttaaggctgttagattacgacatcaacacaaccgatgaaaaccagctaaatgatgcgttggatcttctgatccgccaaaaacctctcgtctacgcttactatgtagatgagaccggagatgaaatggcagccggaaacgctgcaatggcacttgtttactctggggaagctgcttatgccattgatttaaatgatgacctctcctacaatgttccaaaggaaggttcaaatttatggattgactcctggttcatgccaaaatcctgccataacacagagtatgctgagaagtttttggatttcctatgccgggaagacatcgggcttatcaactttgattacgtttactatgccacaccgaatctggcagtaaaagagaatctggatgaggaaaccttatccgacacaacgattttcccgacagaagaaaccctcgaaaactgcactgtttataagcaatatgatgcagacactacaaagttatcgaattatctctggaaaaagttaaaatccgaataataaaatttttcgaaacttttttcttttcctattgttttttcaatttattcatgataaagtaaatccacgcagttcccgatgcgtggatttttttacggattttatttaaaatctgtcctatgtatatcgttttatttccagacaatactgaatgtaaatgttttcccatggtctcatgctattgggaggatttttatgacatatcaggaattcaaagaaaatgtaacaacagcgattcaggcgcggcttggatcttctgtgaaggtaacgattcaggagattatcaagaataatgacacacattacgacggtctcacgatcttatcgaatcagttgaatatttccccaactatttatctgaatttttattttaagcaataccagaaaggcagatccttagaggaaatctatcatgatatcctgtcggtttacaaggaaaacaagccttccggcaatatcgacatttccttttttaccgactatgaacaggtgaaaaaacggattgtcttcaagctgatcaattatgagcagaacagacaacttcttgaaaagattccgtatataagactcttagatctcgcgatcatttttaattgtctcgttgaagccgatgcgacaggaaatgcaacaatcctgatctataacaatcatctttccctgtggaatatcacaagggacgacctctatcagctcgccatgaaaaacactccgaagctccttacctatgagctgcgggatatgtctgatgttctgatcgagctaatggctggcgtcccttgtaattccatgaatgaagaactggaatatatggttccaatgtatgttctttcaaataaaagcaaattaaatggttccggctgtatcctgtaccataatcttttgcacaatctctgtgaaaagttagagtgtgatctgtatattcttccaagcagcatccatgaagtgatcctgcttcctgcttacgatcatgattcttatgacgaacttacctctatggtaaaagaagtcaattccacacaattatccagagaagaagtcttatcagaccacgtctattattattcccgtgagaccggtcagatttctatgtagctcttattgaaaatctgtcagtttttcatagagtacctcatacttgcctgcagagtgtttccacgagaaatcctgtttcattcccctctggacgagtccgttccactcctttttatggtcattgaaaacagaaagtgcataacggatcgtgcccagcatctcatgtgcattgtaattggcaaacgaaaaaccggttccagtatgttcatattcattgtacgcttccacggtgtctttaagaccgcctgtttcccttacgattggaacagttccatatcttaaactcataagctgtgataatccacaaggttcaaaaagtgacggcattaaaaaggcatcgcaggaagcgtagatacggtgtgccatttcctctgagtagccaatattcgcataaagtttttctggatatttctgtgcaaaataacggagcatatcctgataccggtcttcccctgttccaagcactacgatctgcacatcctctgttgctaacagttcatccataatatatgcgaccagatcaaaacctttctgacttgtcattcttgagacaataccgatcagcattgcattttcttttactggaagtccaagttctttctgtaatttggatttgttcagtttcttgccgtcctgaaaactactctcattaaaatgattataaatatatggatcattctgcggatcatactctccataatctaatccattcaaaatgccgtacagatcattctttctggctcgaagcagtccgtctaatccctctccgccctgctctgtcgtaatctcataggcataagtctcactgacagtcgtcactgcatctgcataaacaatgccgccttttaagtaatttgcctcaccgtaagactctaatttgtctgccgtaaagatctgttccggaagaccagtgatatccataaccgcagggagactccagcgtccctgaaatttcagattatgaatggaaaataccgtccggattccgcggtaataattctcatctccatataacgtctttaaaaacacaggtatcagacctgtctgccagtcatggcagtgaatgatatccggacagaaatccagaaacggcagtgcctctaaaactgccttggaaaagtatgcaaacttctctatatcctgataaagctcattatacggcttatctccggcaaaataaaattcattatctacaaaataataggtgataccatcctgttttgtttcaaaaatgccggcatattgttttcgccagcttagattcacataaaagtgacatttaaaatgaagctgtcccttaaaacgttcatccatgcacagatacttcggtaatatgatacgcacatcatactttttcctgtcaaaatactttggcagtgagccggttacatctgcaagacctcctgttttgataaaaggaacagcttctgaagcagcaaataatatttttttcatgttataacccctccaaaccccgaaatacttcgaaatcttaagaatattataacccttttttctctttctgaaaagcactaatacattttgtattccagccggatacggtctgtgatcaatgcgataaactctgaattggtaggttttccttttccattgtgaatggtatagccaaacatctcatcaatcgtgtccatcttgcctctgctccacgccacttcaatcgcatgtcggatagcacgctctacacggctggatgtcgtctgatatttttttgcgatcgttggatataaaatcttcgtgattgaatttaacatatccatatcattgactgacatcacgattgcatctcttaaatactgatatcctttgatatgagccggcacaccgatctcatgaatgatctctgtcacatctgcctcaagattctttgtgctgacctcctccgctttctcataggcatttaccttacgtgcttccgtattctttgcatttggcgtggtcttcgcctttttgatccggttaatgaccatgtcattgtcgaatggtttcatgatataataatctgcacccagttcaaatgcatcttctgtgattttttcctgaccaatggcgctgatcataataaaagtcggatgttttttgatcgtcttatcatgattcacacggtctaatacgcctagtccgtctaattttggcattacaatgtcaagcagaacaacatccggttccttcgtcttgatcacattgtaagcttcctccccatctttagcagttccaacgacattcagttcatcatcactgtcgatgatatcccccaataatcgcaacattctctcattatcatctgcgattgctacattcagtttctccatgctggtcctcctgctgactctaatacattcgtaaagtgtgcttttcgggcacccctttacctgtacataaggatactcatttatatttgaaagattttgtcgaacttcgtcgctaaaactttcaaatggtctttttttatcgtttcttctattctaacatcgtctccgcaaaaataccatatcccttcgccggatcattcacaaatacatgcgtgaccgctccgatgaatttcccgttctggatgatcgggcttccactcattccctgaacaatgccgcctgttgtatttaaaagttcctcatctgttacccgaaaaaggattcctttgtttgcctcacgcccgctgtaatctagggtttcgatttcaatctcatactctcttttttccccggaaaatccgcagatgatcttcgccggtcctgcctcgatatcctgcttataacagatattataataatctccacgcggcagcgctgctatatttccgtctaatcttccataaatcccgatgtctgtattcttctcgatacttccgagacagtccgcactctgataatgaatgatcccggataattctcccggatttcctttctgtccctttttcacaccgataatctgtgcattgtatacatatccttcttttacctgaatgagttctccaacgtcaccgtcactgatcgcatgtccgagcgcaccataagttccatcttccttataatacgtcagtgttccgatccctgcaagatcatccctcacccagacaccgagcatatacgttccatttttattttttgcaggagtcacacagacatctaccatttctccatttctgcttactttgaaaacttccctcgctgcaccattctgctggacgagacgctgtaaatcctccttctcgttgactgcctccccgttcacacttaatatatagtcgccctctttcagaatattttctgccggtgcagcctcacttccatccggctgttcgattttacttgtcccgatcacaaggacaccactcgtcttgacataaatgccaatcggcatgccgcctgcgtagaccgcgtctccgtccactaatacgacttctatatccttgaccggaaaaagtccaaaaagtctgcatgtcacaaaataagactgtctgacattttcggtcgtttcactttttgcagcctcgaaactttcttcctgcaattccattgtcaccggcaattgaaactggtaattgatcgtctcacccgccttcacgtaaatctgatccgggattgatttttcaaaagtataaaccgcaaaaagaaacaccatacaataacctgcatacgctatcccacgaaaaaaacttttgtatctgtccattttttatctcctgcaaaatttgataaagtgtgtgaattttattagagtttcttataaattcttcaaacattcgtacaaagaaaaaagagtacatctcacgctatgtactcttttattatgtgtctcttttttgttttcaaactgttttttccgtgtcagttattggaatttgtttttattttttcttctggtatgcaagttctttcatctctcttgcactttccattactttttctgtgatctccacaccaccaagcatccgcgcaagttcggaaatgctttcctcttccgataagcatttgatcttagataccgtcgtctggttctcgactgatttttcgatcagataatgcgcatctgccatagctgcgatctgtggcaaatgtgtgatacagatgatctgatgattttttgcaagcacattcatcttctcagaaaccatctgcgcagtacgtccgctgattccgctgtcaatctcatcaaaaataagtgtttccactgcatcctgatctgctaaaactgttttgattgcaagcatgattctcgaaagttcaccaccggaagccacttttcccaatggttttaccggctcgcccggatttgtcgagatcaagaactccggatcatccgttccgtttgcagtgtagtctgatgtcttctcaaactgcatctcaaacttcacatccagaaagttcagatcctttaaggcatctgtcacagcgcttgttaatttttttgcatattttttccggattgcggatactttttcgcaatattttttcagttcctgctctgcatctgcaagtttttgcttcaaatttccaatgtactggtcaaaatcctgcaattgttgtaatcggttctgttttttctccaattcagacaatatctctgtaatggagcttccatacttcgatttcaagtgattgagttcatctaaccgcttctccatctgataaaaagtctcatcgtcaaactccgtctcatcaatataatctgcaagttcacggttaaaatcatttacaagattatctatctctaaaagctgttcttctaacgcttttaccttctcatcataggaagccgccgcatttaattcacgcaatgcccttccggtcagttctgatacattgtcatcctggtttccggtatactggtaagcggcgttcaccgcctccataatcttttttccattggaaaacctgcggtaatcagcttcaagagcttcgtcctcgccctcttttaagtccgcttcctcgatctccttgatctcatattccagaaaagaaatttcccgcagtctctcttcctcgtccacgtctgcttcctttaattcctcggacagtgcgcggtaatttttatacgcttccttaagcttttccttccagtcagaaatttcttcctttgcatagtcatctaagatttcaagatgtttcttcctagacaaaagtgactggtgctcatgctgtccgtgaatatcgatcagaatagacgcgatctcacgcattttcgatgctggaacactctcggcatttacctttgcaacgcctctgccattgacaattttcctgcttaagatgacttcatcattctccgggaacacatcgagctcttttaacaattctttctgcctctcgtccgtcactgaaaaaatcagctccactaacgcataatcggcattttcccgaagcatctctttctgtactttttctcccagtgccagattgatagaaccgatgataatagattttcctgcaccggtctcgccggataaaatatttaatccattttgaaaatcaacctctgtctcatcaatcagcgccagatttttcacatgcagattctgtaacatataatctccttctactctccccaaaagtatatgttcttaatcttctaccagcttacgcagacgactcatcactgcaacggtgtcatccacgcttcgcactgcacacattatcgtatcatccccggcaatgcagccgacgatctcatgcagatgcatggcatctaatgccgctgcaactgccattgccattccggaaacggttttgatcaccagaatattctgtgccatatccatagacacgaaaccgtcatgaaaaacacgggtatatttttcagaaagatcttccgttccctctgtcagtgtcacatatttctgtcttccattgctcattgccacttttgtcagcttcagttcacggatgtctctggaaacagttgcctgtgtcacctgatatccttctttctggagataatcggataactcttcctgtgtctcgatatcatgtttttttatcagttccagcatttttgactgacgttttgttttcattccggtctgacctccctcgtttcctgtttatgtatatgtctccatttttttgcggagaatctctaaaaagctcatattatttaatttgcagattcttgctgtggagtctgcttttttgatcaggaacttatctcccacctcaagtcctactgcattgtcaccgtcaaagctgacctccacggtctcgtccttctgggagcgcctttttccaatttcgatcatcacttcatcctctgctccaatgacaatgcttctggagttcaagttatgcgcattgatcggtgtaagcagtatcatctgtgctttcgggtctacgattggtcctcccgcagacatattatatccggtagagcctgtcggcgtagaaatgataatcccgtctgcacggaacgtattcagatattctccattgactgacacgatcagattgacaaccgacaacgcacctgttctgtgaatgacaatatcatttaacgccactttacattctgtcttttctccctgcttgactccataaccgcttaacatcatacgttcttccactgcataatgttcttccattaattcgtcaactgccgagaaaacgttcgattcttccaattcgcaaagataacctaacgttccgagattgacaccgatcagcgcaatgttctgtcctactaacttggaagcagcccggatcaatgttccgtccccgcctaacacaagcacacattccgtgtccggcgcaattgcatccgcttccggtgccgcatgctttgcgtcatccccggtactcacgaagcactgacaggtgccgcctttttcctcgatgtaagctttgatctcattcgttaattttaaatttttatctttgaatgaattggtgataatcaaaaaatgtctcatattatttgtctaactctccatgtgcagcttcaacaacagcatgaacatcgacagattcctctttgctgccctctgcttctttcctgatataaaccagatactcgatatttccttccggtcccttgatcggtgaatattccagattcagaatatgaaatccgatttccattgcaaaatcaatcactttgtgaatgacctcttcatgaactgccttatcccggacaactcctttttttccaaccttttcccttccggcttcaaactgtggtttgatcaggcagaccatttcgccattgtcgtttaaaagttctcttgccggtcctaacacttttgtcagggaaatgaatgaaacgtccaccgaagcaaaatcaagccggtctgctatatcctgtggtgtcacataacggatgtttgttttttccatgcagaccacacgttcatcctgacgcagcttccatgcaaactgaccataacctacatccaccgcgtaaactttaaccgcaccattctgcagcatacagtctgtaaatccgcctgtggaagctccgatatccatacagatctttccctctaaggtaatgccaaaatgcgtcatggctttttctagttttaatccgccacggcttacatactttaacgtattgccctttacctcgatattggcgttttcatcaaaagtagagcctgccttatcctcacgattattgtcgacaaacacatttccttccataatcatggctttcgccttttccctggacggtgcaagtcctttatttacaagtaaaatatctaatctttctttcattctctccgctctcttttttctattttaggcaattgcgaaactcctcataatcttctttaaattgttcaaaattaacaaaatcattcaagacacgctctcgctacgtatcgctcgcaacggtactaagaagccaggcacaacttgccgttgtaccagccgtctaagtgccggcggctccccagtgtctttcatgtcttttgtcaatttttcacaatctaatttaggtttttatgagtttctcaattatccattttctattctaattccacacttctcatatgcagcgattgtgcgtgccacaattgaatcgatatccaacccgacctctttcctcaataagtccacattgccgtgctccacatattcatccggtattgcaatgtttaaaatgcgaatgtctctgccgtcctcattattataaaactcagttacatgctcgccaaatccaccgctgatgacattttcttccagtgtaacgatcactttatgatgttcggtgatgtgttttaatacatcctcatccaatggttttgcaaaacgcgcattgatcagactacacgaatatccttttgacttcaaaatctccctcaccgcagccgctgtctttaccatagaacctaacgcaaacaacgcgatctccgattccatgtaaatccattcactcttgccaaggctgaccggcgcacggtactctttcagtccgtcatacgcttcacctctcggataacgcactgcgatcggtgccccaaagttcactgcatacttgatcatatcggataattcccatttattcttcggtgccatgatcgtcatattcggaatcgaggataaataagaaatatcaaaaataccctgatgtgtctctccgtcacttccgactaatccggctctgtcaatcgcaaagaccacaggaagattctggatacagacgtcatgcagaatctgatcataagctctctgtaaaaacgaagaatacactgcaaaaacaggttttaaccctgccgccgctaatcctgctgcaaaagtaaccgcatgctgttctgcgattccaacgtcaaaaaagcgttccgggaacatattatgaaaacgttttaacccggttccgtccgtcatagctgcagtaactgccacaaccttttcgtccctgtcgcctaattttcgcatgacagtcgaaaaaatatcggtataatttgccttaattctcggattcttcggaagtccggtctcaatatcaaacggttctgttccgtgaaaccttgccggatgccgctctgccggtgcgtatcctgtgcctttgtgcgtcatcacatggatcagtaccggtccgtcaatatgggatgcctctttgatcagcttcacgattccgtgaaggtcactaccgtctaccggtcctaaatacacgatccccatttcttcaaaaaacattcccggaataagcaattgcttgattccactctttgtcttacggatcttcgaaaccattttctctccataaggcatcttgtttaaggaatttaatacatttaatttcagatccagataagcgtccgctgtccgaaatcccgccagataagtggataagccgccaacgttctctgagattgacatattattatcatttaaaataatgataaaattagatttcagtcttgcagcattattcagtgcctcaaatgccattcctccagtcagtgctccgtccccgatcacagaaacaaccctgtaatcctcgcctgtgatttctctcgctaatgcatagccaagtccggcagagattgatgtagaactgtgaccggtatcaaaacagtcacatgcgctctcttttctcttagggaatccactcattccgccatacttgcgcagtccgtcaaagccttcgcgccttccggtcagaagcttatgtgtatacgactggtgaccaacatcccagatgatcttatcttttggcaggtcaagtgctaaatgaagtgccatggtaagctccaccactccaagattcgaagctaaatgcccacctgtcactgaaatcttttctattaaaaattcccttatctcagacgcgagaattttcagttcctcgtctgtcagggatttgatatcgttcggtttattaatcttttctaataccatagctggtacctcgacttcttactttcttacattcattacttttctcttgagatcagataaagcaataattcatttaaaaattcattcttcacaaccagagaatccattctctcgactgcgctgtttgaataaaaagccacatctttttttgctttttcaagtccttcaaaggaaacatacgttgctttatggttcttctcatcactgccgattggttttccaagcacctctaacgtgcttgtcacatccagaatgtcatcctggatctggaatgccagtccgacttctgccgcaaccttctcaatcgtgttctgctcattctttgttgcgccagctaaaatcgctccaatcagcatagaactttcgattaatgctccggttttcaggcgataaataaaatcgagcttttctcttgtaatgtcaccggaatcttccgactgcacatccacaacctgtccgccgaccattccataaattccggcttttgtggcaagcacctgcattgcctttccgatattgcggttatccggttccatgtcaaaggcttttgtagcagtctcaaatgcataattcagaagtgcatccccggcaaggattcccattgcttccccatatactgcatgtgttgtcttctttccccggcggtattcgtcattgtccatcgccgggagatcatcatgcacaagcgaataggtgtggatcatttccatggctgccataaaaggttcgattaccttcgatttcccgccaaaaagacgataggtttctaacattaacatcggcctgagcctttttcctccggcaagaatactgtagttcattgcctccatgatcgtcttctggtaaccttcctccttcggaagatacccttttatgatctgttcgatttcctctactcttgtctgaatctctgctctaatatccacctctgctgctccttcttatccttccagatctccataaatcgtaactgttcaataccagtacagttatgattcaaaatccatttatcatatttcattcaaaatctgccagtgatccgtcagcctgaatcacctgcatcttcttctccactgcatctaaaagcgcattgcaattctttaacttctcaacgcctgcctgatacagttgaaacgaatcatccaaagtaacttccgggctctctaactgtttgataatggtctctatctcttcaaatgtctcctctaacgagacattctgttttgtctgttcttcactcattgtcaaatacctccgtgacatttgctttcagcgttccatgcagcagatgaatgtcgagtggatcacccacctgaacttttgcggcatccatcactgcttttcctctttcatctgcaacataggaaaatccctgactcagtttcttcaaaggagatactccctctaactgcccggtcagaagtgccagcctgtgctttttctccataaaattctgttccatctgccgatgcagtttttcttccagatctatggcatatttacggtgttcatgaagcttattctcaggacttgcgtattgcagctttgtctgatactgctccagtttcagtcttgccctctctactttctgctgcagggcacggttcattcttcctgcttttcctgaaatctctgcaactgccgcctgataatcaaaaactgcaagttcagcagcagccgacggtgttggtgccctaagatctgccacaaagtctgcgattgtcgtatccgtttgatgaccgaccgccgagatcactggcgtctcacactcgaaaatcgcccttgcaacttcctcctcattaaacgcccaaagatcctcaatggaacctccgccacgtcctacaatgatcacatccacaccaagcgcatctaatgcacggataccatttacgatactgcttaccgcaccttccccctgcaccagcgccggatataaaataagctgcacataaggattccttcttgcggaaatattacgaatatcctgtacagcagcaccagtcggagctgtgacaatcccaagcctgcttatatatgccgggattctcttcttgtactccggggcaaacatgcccatctcttctaattctttttttaacgcttcgaattttaaatataaattaccagctccatccagttcgatttccctggcatagagctgatacttaccgtcccgttcatatacttccacagagccagtcacaatgactttgtctccctctttcataggaaaagaaagtcccttgcggtttccggcaaacataatcgcattgatcgtccccgcggaatccttcaatgtaaaataaatatgccctgaggaatgatacttgcagttagacacctcgcccttgacactaatgcgctgcatcataaaatcctgagcgaacatattcttgatatatgtatttacctgtccaacagaataaacattcttcatcatgctaatttcgccaatactccatttacaaatgccggtgattcatccgttccatactgttttgcaagttcaacagcctcattgattgcaacttttaccgggatatcatcctcgtacttcatctcgtataccgcaagacgaatcagagtcagatctacttttcccattcttctggtcttccatccttcagacacttcgttgatcgctgcatcaatctcatcgatcttctctacaatattgtggaacttgttggagatatactctttgtccttctcgctgcactcctccacttcctcaaacatattcatctgttccggcatctcttccacattatggaactccacgcggaaaagcattttaaaaacctgttctcttaatcctcttctggtcattgattgatcctttctatttgattcattctgatgatttacgatctgacagaccactgccattcgcccttctttttacaaggtaaaaaaaggatgtcgctcggacaccctttattctactacatcgtccataactaacgttacgttctgcaaaggattatttattatttcccatatctacggttgcaatacgaacattcacgatagatacttctaatccagtcatattctcaattgctgattttacacgttcctgaactttcgcagatacttccgggatggaatatccataagcaatattcagtgcaagatccacgttcacaataccgcttaatacttccacgcggacacccttggaaagattcttcattccaagcttgctgacaagttcattcgtaatgttaccagccatggaactgacaccttcgacttctgttgcagccagtcccgcaataattgcaactacttcatctgctatcttcacttctcctaaatgtccatcctttattttaaatgtttttctatcctcagccatcgcttaatgcctcctaagtgatattatgcatctattataacagactattctgcttttgaaaacaaaaaatgtattaattttctttccgttctataaagtcgcacataccgtctcccggctcggatttaaaatcataagcaatatgctctccctcaaaggaaattgagaagctgccctccatatccataaaagaatgaatgtgcgcaatttctgataaaatatccgcaaactcatctaaaaatgcctctgctgcatctttatttttgcagtctgcctccttgatcgtctcatccacgtataaacgaagatcaaactcatctaaatcgctctcattatcgatctgtgcacattttatgtatggatttgcatgattatgcagcacgttttccagataggatgcagaagaaaggatccttgactgtgaaacatcctctgcttctaagtataatttatattcgatttttaatgcattgtctgccatattggggttcctcacttttctttggtttttacaattacttattttaccctatatggcataaaaatgtaaatatgtggactgtacaaaattagataccatccaacaattgcctcgccccaaaaacagtgctatactttttctgtcacatcatatgacagtctattttatactaaacgtattgaagtgctatcctatgatttaaaaataaaacgaaatatatgaggatttcacctatgaatcatacagattttcatccatttgaaatgcattttgaagtaccggattccgcagaatccatcgtgtatacaagaagatttcaggcaccacggcgtctgatcatcttaggctgcggctacgtagcgcaatcgctctgccgctttgcctcccagttggaatttgacatttatgcggcagacgacagaccttcctttgccaatccttacacgatgacaaacgcaaaaaaagtgatctgtgacagttttcctgctgcgatcaaacagatacatcctgatgaacaggatttcgttgccattgtcacccgcgggcacaaacatgatgcagattgtatccgcaccctttatgccagtgacatcacacctgcttatatgggacttatcggttccaaaagacgtgttgccggactttttgaaaacctctgcacggaggggatcaaccgctcttttctcgatcagatccacacgccgatcgggttagacatcggtgctgtcacaacggatgagattgccatttccattttatccgaactgattctctgccgcagccggctttcccttggaaagaagaacgggattcttgaacagactaatctcgatcccgctttcttaaacgcactccagacagagggaccaaaagcgatcgccgttgttgtggaccgcaaaggctctaccccagttaaaaccggggcgatcatgtgcgtcaatgcacttgggcagtcttttggcacaatcgggggcggctgtggcgaacatgaagttctgcaaaaggctttagaagttttctctgacaaaaaagatacgtttctctccgtcgatatgaccaatgattttgccggggaagaaggcatggtctgtggaggaactatggatgtgatcattcgatatgtaccggaggaaatttttaaataaaatacagtttaccgcttaataagcttctgaggagctgcttgcaggatcacagcagagattgctactggaatgaacgacatttatcaattttgcgagttcttcaaatactttatctgcatataactccttgatctcatggcggctcatccgggtgacctttgcattgtattcaaagtcatatgctttctctcccacaagaatacagaaaaatacctttccctgcatgctgtctgcattgttcggatcaacattcccggtcgtacctgtgattccgattgcaatctctgtatgaaggtttttctgagcagtttcagccatcgccctcgcacattgcttagaataaacaccgtactcttttataattttttcgtcgacaccgcataagattttcgttttgttcagataagtgacataacctcccggaaaaactgccgatgccccctccgtatccgtgatcatggatgcgatcagcccggaagtgcagctctccatggtggagatcgtggtatttgtgtcgataagttttcttacgattttatctttttcctgctggttcattttatttctttccccttgaatttcactataagatatataactatcatggtaaaaacgctgaattcgcaatcacaagtatactatttgtttcattatctctgccacattcatttatcgtatttttctatcagacacatatgctctttactctttttatcataattaattgccacaagcaatatatcacctgtatattccaatatagaagatggatattttttatcccggatttgttccattgccgtctccgcattctgattccatttcaattctacaaccaatgcaggataatcctttttatattcacttttcggaataaatacaaaatctgcaaatccacgtcctgtcggcaattcgcgaattggtttaaaataatacttcatagcactcagataagcaattgtcagaacactgctcaatgaattttcgtcatggtattggatgacagaaacatattcactatgaattttctcaatctgtctggcaacggcatcttcatccatatccaaagttgcctccaacagattttcagaatctttccaaaacaaaagcatttcattccaatgtctgctggtaaccgccatagtcagttcctgccgtatctcctcatttggaacaaacgctgctctctttttctgatcatatccaaggtaacccaaatggatcatataagtaagcacatcgtctttactttggatatttacaatatcatttttaaacgttgctgtgttgacattcactattccaccggaaagcatctcgatcacaagcgttttcaagccatcataatccatattgatcaatggcacaattgcttcataagaagctgtttctgaccagtagctcttaaactcaccatttaacattacacttacaacagctctcggattataaacctcataatctttcaacagatatccatcgtaccatctcttaaccttatcaaaatcctgatggtatgttgccgctaaccttcgtacctcatcctcggtaaacccaatataatgtgccagactgcccggacttaacattgtaaattcgtcaaaattatttaatgctgactgcgttttttctttttttatcggaagtattcctgtcagataagccaactgaatatattttgtcggttctgttcctttaaataatcctcttaaaaacccgatatattctttctgaatgagttcgttcgccgcctcatccctgatcaatacatcccactcgtcaatgatgattacaaatcgcttgcctgtagccgtattaatctgcgataatgcttccggcaacgattttgtttctttcatcggaacatccggataatattccctcaattctgctatcgttttttctgaaatataagaaaccacatgttccggtccaccagcaggctctatgcaccactgaatgtcaagatgaatgacatcatactgattcagatgtcttttaaaatcttctgctttactgatttctaatccagaaaacatttcctctgaattgcagcccctgctgtagtatgctgtcagcatatttgcggtaatcgattttccaaaccgacgcggacgactgttacatataaaagcatccgtagatgccagcacactgttcgtataccggatcagcccacttttatcaacataaattctagcattgagcgttgcctgaaacgcagaattatcaggatttacaaacattcccatgcacactctctccttctgattcactcttaaattgttatacatctatcgtaacattgcgacatcaaaataacaagaaaaacaatattatctcagcagccgtgcgatttcctccctgtaaggcggaattgtctttttcgtttcaccttcggcacaaagccatggcgtttccaaaatcttaggcacatttaagaagcgttcatcatgaaccactttatataatgtatcaaaaccaatcgttcctgctccaatattcgcatgacggtctttgtgtgcaccaagcggattcatgctgtcgttcacatgaaaaacagcgatctggtcaagacctaacacctcgtcaaattttttgaaaactccgtcataatcattgacaagatcataacctgcatcatttacatgacaggtgtcaaagcagactctcagacgctcctttttatgcacaccgtcataaatcatttttaattcttcgaaggtgcgtccgatctcgcttcctttgccagccattgtctcaagcgcaatgtacacctcatcctcgttttcatctaaaacctgattgagccctttcaccgcctgtgcgattcctgcttcggcacctgcgtctaatgcagaacccggatgcagcaccagaattttgcttcgcatggcagccgtgcgtttgatctctttttccagaaactgtactgccagctcaaaggtttccggctttaccgtatttgcaaggttgatgatatatggggcatgcacgataatctcctctatgcctgctttcttcgcatactcccagcctgcctcaatattcagttctgaaatttcttttcttcgtgtattctgcggtgctccggtataaagcattaaaatattggcaccataactttccgcctccttcacggaagcaagaaacatttcctttccagccattcccacatgggaacctaatttaatctgtgacattgttcgctctcccttatcttttctttatctgtaattgtgatactctaatttgcattatgaaccttgtgaaaatagaacaaaattttgtaatatttgtaatgtcaaaatgatttttgctgcatattgcttactgtaatttgcacttaagcaaaaattttatctctgcaagatactctctgaacatattgttcggcagataaaatctggtagaatccgccgcaattccacatacgttagataacccctgcttttctgcaatctgcaaagcacgaaacatatgaaaatcattggtaataattcccaccgttgcatcctctggtatatattttctgctgttacttaaattttcttcggttgtttttgatttatcttctaatagaatacgttctttgtcaatgccgttttcagtcagatatttttccattccgtatgcttccgaatatggttcattttttccctgaccaccggacacaatgcagattgtctccggattctcattcagatacaagattgcctcgtcaagtctgtatttcaatacaacacttggcttatccgcatgtacctgtgctccaagcacaatgatataatctagttttggttctccctgtgccttcatctgactaatgatcaatccctcaatcacaacaaatgaaatcaaaaaaataccacacacaattcctgcaatccatttgactgcctgtggtattttctcccacaatcccatatggagcacaccagcaaacgcaaaaaatatcactgcgatgccaatccatacaacaaaaaattttgttccaccagagcctgcgattgccacaatcaagccataaatcagacaaaggagccctaaaatcagacagatcatcatatattttttcctcattcttccaccctcattttttgcaaacagacttcgttttctactaccgctgctttccaaattcccagaaagcgaccgcactcgccgccgctacgtttaaagaatccactacgtggctcatcgggattttcacggtataatcacagtctgccatagtttctgctgccaaaccgtcaccttctgttcctaaaataattgccagtttttcttctgcatgcagtttagaatcatcaatgcggacagaatcattccgaagtgccattgctactgttttaaatccgtactcatgcagtaaatccatcccgccctgcggccatgtcacttttttcgtttcaatataagtccacggcatctgaaatacagtgcccatgctcacacggattgccctgcggtataacggatcactgcacccggatgtcaaaagcacagcgtccatatttagcgctgcagcagaacgaaaaattgcaccaacgtttgttggatttacaacattttccaatattgctatccgtcttgcatttttcagaatttcatggatttccggcattgccgggcggtgcatggcacagagcattcctcttgcaagcttatatccggtaatctgttctaacacttcaagctttgccgtatacaccggtatgtttttgcaccgttttacaatgttttttccgcaagtatccagatcctttttctccattaatatcgagattggttcacatccaaaatccagcgccctctcgatcactttcggactttctgcaataaaaatcccaggcgcaggctcaaaataatgcagtaattgtgcctcgtttaagcttgtatacacttgtaactctggcaaagtcagatctgtaatctctattatgttacctgtatcttgtgttctatcacttttttccattctattgtcactttcaattctgttgttgttatattctgaaggaatgattatgggttacagtttttacatggatcatatccgtatgcgattgcttcctctcttgttcctgtaaattccgcataattttccggtttgattttctctacactgtaacagcccggtttgtggaacttgtgtgtattcgtgtttaaaatataagtctgtacatctgactgcgccggctgctctccaccgacactctcggaaggctgcggtgtatttgtatctgttgactgtgaagtttcctgctttgctgtgtctgtatctgttggctgagaagtctcctgctttgtagtgttttcgttgtttgtaatcgttccgtcgactgtactctcccctgtcgcataatcaatagttactccaggttgtacattataggcaaaaacacagaacagtattccttctccattatcctccaccgattttccttccataagcacgccggaagccagcagattatctccttcaaaaaccggcgtcacacgatacataacgtgttgatctgtttcttttacatagtccgctaccatattttcaaatggaagcattccttctatgttcaaatatctggttccggtaataagatttttttcatttgcattttctcctgtaagctgataaccgatcagatgacagcggttatacaaatattttccatcgataaaatcatatttcacagtatgccagccggtcggctttaccgcaccaatatttccacgttcctccgccggcatcagattctgtcccacgctcgccacacagactgtgcatcttccaagcggatctaattctccatacgtctcataagaagcactgctcaactcttcctctgtaaaaaatggaacattgccattgactgcaacatacgcttttccttcatatgctggaatggctgcaaaatcaaatgtttcctcgatcgtcgttgcattttctgttgacggtaaacttttttcctgttcctctgtatctgtctgctcttgtgttttctcttcaatatcatctgtaatttcttgtgtgctctgtgccggttctgtcgttccacatccggaagcagactgcagtgtcagtgcaagacaaaccatcatcgccagtgctctcattttagttttccagtttaagattccacttttcttctccattaccttactcttacaaaactctgttcgttctgctttttctccttctactctctgcaataaatttcttttgtgattttttcatgtgaaaaaccgggaaattcttccgtttctgtcagtttccattcggctcctatctcaacagaaacatctgctggatataccctgttccagcgatagattataaactgctcaatttgctcgtcatctgtatccaatgtttccaattcctgaaaaacatattctccttttttcgcctgcccttttggattttcactgatttctaaattcgaaacagcttgaaacagcttccggctgtaatcagttatccaaagcttcttttctccaactgttttgctgatatcttccactactatgcggtcctgtgactgccttctgtgattgaaggcaagtccgttattgtcatctaaacatatgatgatgtacattacgatactccttgtatttgtttaacatccaagttctatcatatcgttttttcgtacttttgccaataaaattatattattttccactgtttaatacgttccacgtgaccactgctgaataaaaatagcacctgacagatttttatttccgtcagatgctatataaatcggattatttatgttttcgtttcgcctacataaagcagtaatgtaggctatttccgtgatacttgcattggtacaaattcaattttcaattgcattcccaatccagaagcaagttccttttgtgttaaattctgctcaatccgtgcatcaatcatagcacggatgacatccatttctggctgaatgtcatcccattctttttttaaaatcaggatcttttaactgttcctgtaataatccgtaagaagccgtgtgtcatttcccttcaggcagaattgtagagcgtgtttgtgtatgaatctgcataatttgtttcggttggtgtgattgctttaatcatagttttgttctccccctctttggttgcaataaaataacacccttgttgggtgcttggctggtgtgtggttattattaattttgatataaaaatagaggtatacacatttcaattaagatttgtgtataccctatttttttacgattttgcaaaagttctttgcagttgaattatttccccacaatttcatccgtattaataaactggaacggcgtcgtctgataaacgtaataattcaaccagtttgaatagaggatgtttccatgtgatctccactgcagtctaggtttctgtgtgtcatcatcatctggataataattaacaggcattttgatatccagccctttgtccttatcacgcttatactctttgtcaagagtaaccctgtcatattctggatgccccatgacaaaaatcttgcgtccttcatccgcaatggcaaggaacacgccggcttcctctgattctgctaaaatcgtcaattccttcacggcacggatatcctctgcacgcacttccgtatgcctggaatgcggtgccataaaataatcatcaaatccacgtacaagcggtactttgcggttcatcacatgatgctcgtacacaccgaactttttctctgggagcaagtgcttctgcaatccataatgataataaagtcctgcctgtgcaccccagcagagatgcagcgtggaagtcgcatgtgttttgctccactcaaagatctcacacatttccttccagtagtctacttcttcgtattccatttgctctaccggcgctccggtaatgatcagaccatcaaaataacgatttttaatgtctgcaaatgtctcataaaacttattcagatgactcattgatgtgttttttgactcatgggaagacactgccacaaaagtcacatctacctgtaacggtgtatttgagagcgagcgcaaaagctgaagctctgtatcttcctttaacggcatcaggtttaagattgcaatgttgattgctctgatatcctgatgtgtcgcacgattttcgtccataacaaatatattttccttttccaatatttcctttgccggcaaatcactctgtgtcttaattggcatatctttttacaaacctttccatatgttccggatcattttcatttcttcgaatgacccagcactttataatcttcatccgtaaaaccagtttaaattccaagcatttcttttaactgttcttcggaaatgaccgggattccaagctcctgtgctttcgtcagcttgcttcctgcattttctcccgcaagcacataatccgtctttttcgaaacagaaccagaagcctttccaccgtatttttcgatcagctctgatgcttcttttcgtcccaatgttggcagtgttcctgttactacaaccgtcttaccagtcaggacagattctaccgtctctgtttcttccgcctgcatattcacgccatacgctttcaggcgctctaaaatctcaatatttttctcatctgtaaagaaattgcggatacactgagcactcacttctccgatatcattgacctctgtaagctgttccaccgaagcttccttcaaatggtccatatctttaaaatacttcataatcgcttttgcagcggcttttccaacattcgggattccaagaccggtaagaagtttgtaagcatcgttctcttttgacttctcaatcgcttctaaaagcttatccgtatttttttcttttccaatgattccctgttcaatcagttcgtcgcgatgtgtctttagtacaaaaacatctgcgacattattaatataccccaaacggacaagttcttcaatataaaccgtaccaaaacctttgatatccattgcatcacgccccacaaagttgataatatggcgttctaactgagccggacagtttggtgatgtacatttaatatccgcagtgtctttctccctctctgtctttgcaccgcaaacaggacaaacatccgggatcacaaaccgtttccagtcagaaggtcttttctcttttttcacttccttgatcttcggaatgatctcccccgacttgtaaactacaatcgtatctccaatcccgatatccagatcatcaataaaatcctgattgtgcaaagttgccctggaaacagaggttccacagaggcgcaccggctcaaatacagctgtcggtgtgattcttccggttcttccgaccgaaagttcaatatttaacagtctggactctttctcctccggtggatatttgtatgcgattgcccagcgcggtactttggatgtttctcctaactgctcacgatcagaaaaacgattgatcttcaccacggcgccgtcgatatcatatgccagatttccgcggttttcaccgattgccgtgattgcatcccaaacttcctctgcggtcgtgcagactttgtaatcatcaatgacatggatcccctgttttttcagaaattcatatccttcggtatgagttgcaaactccatgccacgcacctgctggatattaaaaataaacatggaaagatccctctctttcgtcaccttgctgtctagctggcgaagggttcctgccgcacagtttcttggattcgcaaatactttttttcctaataattcctgcgtctcattgactttttcaaacgcagcgtttttcatatatacttcgccacggatttccagatattccggcttatcttttaacttctgcttcacatctttgattacttttgcattggcagtgacatcctcaccgaaattgattccgtctcctctggtctcagccagctttaactctccgttctcatagcgcagtgacatggaaagtccgtcaatcttatattccacaacaaattccgggtggtctaactgcttctgcatctcttctacaaaattaaaaacttcctctttggaaaaaacatcctgaagacttaacatcggaacattgtggcgcacaagcactccggcttcccttttcgccgttccacctaccctctgggtcggcgagtccgatgtgaccagttccgggtgctctttttccagacttttcagttcctgcatcatcatgtcatattcatagtctgtgatctcaggattgtcctgattataatagcggtcaatatgatattcgagtgttttctttaactcggcaattctttcttctgctgacattttcttcatccatttctgttcttatttaaagtttttctgcggaatgaccgtttcattcgaggaatccttgataagcgacaaaagctgtctgtattcctccggcgtgacatcgcggtaagttccaaccggaagatcacccagtttaatgttcatgattcttgtacgaacaagtttctccacacggtaaccgaaatattcacacattcgtctgatctggcggtttagtccctgtgtcagaataatcttaaactgtttttttccaatctgcttcacatggcattttcttgtcatcgtattcaattctgcaagtggcactccattcgccagaccatggataaagctttctgtgaccggtctgtttaccgtgacaatgtattccttttcatgcatatttccggaacgcatcattttgttcacgatatctccgttgttcgtcagtaataacagcccttctgaatccttgtcaagacgaccgatcggataaattcttttcggataattgatataatcaatgacattattcttttctcttttttctgcggtgcagacaatacccaccggcttatgaaatgcgatcaggatcatttcttcttccttggaaacttttttcccctgaaaaagaactgtctgccccgggaaaactcttgcaccagtttctgcaacttttccgtcaatcgtgatatttccaagttctacctgacgatctgcttcccttctagaacaaatccctgcctcacttaaatatttgttaatgcggattccgttttcttccattttttcccttccaaacaactacaaaaacggagacttcgatttgctggaagcctccgtagcattctgttactttttattttaataaatcagtcttgatatatccggtcttgttcttccatgttactttcgtccagccctctgcgtagctcatcacaaccgtaactttttctccggaataagcaacgccaactttgtcagccgtctcactcatggaggaacggatattcgttgtattcgaaagcgtaatctcagttccctctgtcagaccgtttgctgtggttgttccctccgaagtactctccggtgctgtcgcagataaatattcactcttgatatatccggttgtaccgttgtaatcaatgatactccagtccccgtctgtgcctgtccttgtaagggatgttcctttttcgacagaaccaagcttgtctgaggaagtatctgctcctgctcttacatttaccttatctgttgtgtaaacggtctcactggtctgttcagccggtgtttcttccgctggtgtctcatctgtcggtgtttcctctgccggtgcctctgtagctggaacttcctctgttgccggaacttcttctgtgctctcagttgcatctgccacgatcgtattgcgccactccgtgattgcatttggaatggtagttgcgcacagattcagcagattctcatctgtggacaatgcagcctcatatttctgctggatgtcattctgtaactcgatcacatcatcactgttatagaaatttgtgatcagattgcggacactcgtatctaacgcactctcctgtctggaaagattatattcactgtaaaggttatcaatgtaaaggcttccgtcctcattcgttctgacatagaagaaataaagtcccggagccggtgtgtctacgcccataaacttcacattcagactgacatttaccatataagaattgctgtcaagtcctgactttgtatagcagttgatatcctgatactgctcaatgtactggctgatcagtgtgatgtagctctgctcattctgtgtgatcggtgttgcaagcgtctgtaatgtcacgagatctccggatgcataagcagtaaaataattgttgatcagttcattgactgccgggatcgcattctcctcgtatttttcctccgtcacaactgtctcggttgccacaaccattccgtcattcgcctgatttgtattatttccggtaaattttactaaaataagtaaaatcacgacaaataatgcacctgccacaaaatatctggcattcttttttacaaattctaacattttctggatatctatattttttaatttattatcatgattctctgaagccatctttaccaaacctttctgtcacagacatcagctttatctgtgaaatctattataaaaaaagtaatgtttcctaccttattattacacaaagttactctaacaaacattttacatgatagcattatctccctttgttgtcaacgaatggcagacttttccaattcttaatatttgttttagagcgcaaaaaaagatgccgtattctggcatctttttactgcacctggcgggaatcgaacccgcagcgtcggagtcggagtccgatgttttatccattaaactacagctgcaaattatctgatattctgttcacacagcctattaagcatatcagataacaatataaatttcaagagatttttcgtctgtcaggcaaaaattttcttatttaaatcttttaaaagactggctgatttttttaactgctcctgctcctcctcatccagttcaatcggaactaccgcctccacaccgtctttcccgacgatcgccggcatactgatcaccacatcttccataccataaatgccatgcatcatggacgatacaggaagaatggactgctcgttgcggatgatgcactcacagattcgttttaccgccatagcgatgccgtaataagttgcctgtttccgctgaatgatctcgtaggcgctgttttttacttcctcataaattttgttttccgattcttcatgaaaatagtgcccacgcatctcacaaaacgcatccagacgcacaccggaaacattggcattcgaccatgccgccagttcgctgtccccatgttccccgattataaaagcatgcacgctgcggttatcaaccttcaaatgctcaccgatcagatattttaaccttgcggtatcaagcaccgttcccgatccaagcacccggttttccggaagacctgacagctttaacgctgtgtacgtcagaatatccaccggatttgatacgatcaaaagtaatccctcgcaattgcgttttgcaatttccgggatgatcgacttaaaaatctctacatttttatgaataagatctaatctcgtctcatccggcttctgatttgcccccgctgtaataataatgattgccgcatccacaatgtcatcataagttcctgcataaagcttgatcggtcttgcaaacggcagaccatgtgcgatatccattgcctcaccttctgctttttccctgttcacatcgatcattaccatttcagaaaaaagtccgctctgcatcaatgcaaaggcagaggatgaacccacaaaaccacagcctatcattgctgcctttcgaatatttaccataaaatcacctcgccaatttttttagtttcgcaatcatctgattctttcctatcattcccttattaaactgattttatgttgccttttacagcataatttacgcttcactcataccttgctccctcagttgcaatataccgagcgcaacgcattgtttttcgaacatatatttgctttttatttacagattcaacttggtttgctataattaatgtaaattgtattataaaattgcaaaactcatagcagacttggagaattgtgaaaaattgacaaaagcttgagaaaacactgagtgagctaaaatcgaacaagttcgattggttcttgcttggcagacatagcgttagctgtggctggcatgctagtaccgctgcgagcgacgcgtagcgaaagcgtgttttcgaaaattttgttaatttttcacaatcttcacaacctgaatctgagttccgcaaatgcctatacaaaaattgcaccaaggaggaatctgtatgcgctctcttatttttcatatcgatgtaaactctgcttttttgagctgggaatctgcaagacgtttgcgtgagaacccggatgcacaggatttaagaacgatcaacgcagtgatcggcggggatgagaagatgcggcatggcgttgtgttagccaagtctccttccgcgaagaaatacggcatcatgaccggagagccattatctcatgccagacagaagtgtcctgatcttgttgtgattccaccggatcatgaattatatgctgcttcctccagaaagtttatccatattttagaggaagttgctccggcgattgaacaatgcagtattgatgaagccttttgtgacatgaccggaaccgaaaagctttatggtgatcctgttgcttttgcagaaaaattaaaagaccggatttatgcggaacttggctttactgtgaatattggaatttccacaaataaattgttagccaaaatggcgtctgattttgaaaaaccgaaccgtgttcatacactttttccggaagaaatggctgaaaagttctggccgcttccagtcgaagaattgttcggctgcggtaaatctactgccaaaagactgcgtgctcttggaatcacaacgattggtgcactcgcaagggcagacaggcagatgttactctcaaactttaaatcgcagggagactatttatgggaatctgccaacggaatcggttcgtcttccgtcactgccgaatccccagccagcaaaggctacggcaattctgtcacgctcccttatgatgtcacagacagagaaaacgcgcaccacattttattgtctctctgtgagactgtgggtgcgcgcatccgttatgataaagcctatatcagtgttgtgcaggttcagatcgtagacaacgaatttcatcatcgctgtaagcagttatcactttcctctgccacaaatgtgaccgagaagatttatgaaactgccctcaaagcctttgatcagggctgggatcattcccctatccgtctgctcggcgtgtctacaagcaaagcaactgatgaaagctacgaacagtataatctttttgatcaggataagtttgagcggctttccaaattaaattctgccattgacaaaatccgtgataaatatggagatgacgcaatcaaacgtgcctgtttcgcagagccgcctgaaaatttttaagccacaacatcttcaaactgtgaattataaaggtttgcatagaaaccgcctgctgcaagaagctcctcatgtctgccctgctcaataatgtcaccgtctttcatgactaagatcagatctgcatcacgaattgtagacagtctgtgtgcaatgacaaaactggttcttcccttcatcaggttatccattgccctctggatttcaatctccgttcttgtatcgaccgaagaagtagcctcgtctaagatcaggatcttattatccgcaagaattgctcttgcgattgtaaggagctgcttctgtccctgcgatacattacttgcatcctcattcagttccatctgataaccgcccggcaaagtcttgataaagtggtctgcccttgctgccttagctgctgcaatgacttcctcatccgttgcatccagacgaccataacgtatattttccataatcgttcctttgaacagccaggtatcctgcaataccattccaaacgcatcgcggagttccctgcggttgaaatctttgatattgtttccgtccagacagattgcaccactgtttacatcatagaaacgcatgagcagttttaccatagttgtctttcctgcgcctgtcggaccaacgattgcaattttctgtcccggttttacatcagcactgaaatcgttgataatgatctgctccggattgtatccgaaatgaacatgatcaaatgtaactgcgccagtgatttttgatacatctgccggatgttctgcaatctgttcttcctcttcttcctctaaaaactcaaatacacgctcggaagctgcggacattgactgcacctgattgatcacctgcgcgatctgctggatcggctgtgtgaaatttttcacatactggataaacgcctggatatcaccaatggtaatggttccgttaatggcaagcagtccacctgccaaagcaacacacgcatatcctaagtttccgacaaacatcatgattggctgcatcataccggataaaaactgtgatttccatgcagaatcgtaaagaatatcatttgtcttttcaaattcctcaatggtatctttttcgcggttgaatgccttaatgacaagatgaccgccatatacttcttccacctgtccgttgatatgtcctaaatattcctgctgtgcacggaagtacttctgtgatttttttgtcacaaaaccgatcagtcccatggaaatcggtaagatcacaattgcgatcagtgtcatcagcggcgaaatactgagcatcatcaccagtacaccgatcagagttgcaactgacgtgataatcgtggtaatactctggtttagtccctgccctagcgtatcaacatcatttgtaatgcgtgacaaaacctcaccgtaagtacggctctcaaaatatttcatcggcatgcggttgattttttccgaaatttcctttctgagccgatagcacactttctgtgtgattcctgtcatgatccagccctgaataaaattaaatatcgcactgcataaatacagaccaagcacaaataaaagaatgcttccgattttgccaaaatcaatgcttccggttccctgaatctttgccattaacccttctgacagagttgtggttgcttttcctaagattttaggtccaacaacattgaacacggtagaacatgccgcgaaaaacatgacgataaaaatagcaattttatattttccaatatagctcatcagctttttaatggatttcttaaaattcttcggtttttctcccggctgcataccatgacccataggtcctcttctgcgtggctgctgtgtcttaaattcctgctctttactcatgcaaagccacctcactttcctcaagtccaagttcttttgcggataactgcgattttgcgatctgctggtaaacttcacatgaccttaataattcctcatgtgtgccctttccaacaatttttccttcatctaagactaagatctgttctgcatgcaaaatcgtgctgatacgctgtgctacaatgatcacggtgctgtctgttacattctcggcaagtgcctttcgaagtgccgcatctgtttttaaatccagtgctgaaaagctatcgtcaaaaataaagattttcggatcttttgcaattgctcttgcaatcgcaagtctctgcttctgtccgccggaaacgttgcttccgccctgtgcgatagcactctcgtatttatcatcttttgcctcaataaactccgttgcctgtgcaatttctgctgcctttttgatttccccatctgtcgcgtcttcttttccaaaacgcaggttagatgcgatcgttccggagaacagaacacccttctgcggtacgaaaccgatctcctcacgaagatctgacatggaaatattccggatatcttttccgtcaagtgtgatacttccctctgtcacatcatacagacgcgggatcagattgaccagtgtcgatttaccacagccggtgcttccgataatggcagttgtctgtcccggttctgctgtaaaatcaatgtcatggagcacatcttcttctgcacccggatatttgaagttcacatgtgaaaactgaacaacaccattatgtgttgtcactttttccggttcttttgcatcacggatagaggattttgtctggatcacctcatcgatacgatctgctgcaaccgcagcacgaggaagcatgatcgacatcatggtaagcattaagaacgacattacgatcatcattgcatacgtgataaacgcagtcatcgcaccaacctgcatggttcctgcatcaattttatgcgcgccaacccacacgataccaacagaaagcaggttcatgatcattgtcatacccggcatcataaaggtcatgacacggttggtaaataacattgtttttgtcagttctttatttgccacgtcaaaacgttcttcttcttttttctccctgccaaaagcgcggataacagaaagtcctgtcaaaatctctctggataccaagttaatgttatccactaatttctgcatcagtttaaattttggcattgtaaccgccataagcaccatgacataaccaaggatcacaaggattgcaagaacgatgatccagcccattcctgctcctgtctgcatgactttaagcacaccaccaagtccaaggatcggtgcatatgcgatcattctaagcagcatgaccgataccatctggatctgctggatatcatttgtacttcttgtgataagggaagccgttgaaaacttatccatctccgcattggaaaatccgaccacctgtttgaatactttttcacgcaatgttttaccgattccggcaccgacacgggatgcaaaaaatccgaccagaaccgttacaattccgattacaagcgccatgccgaccattttaagtcctgctgtgacaagataggtcttctggattttatctacgtccagtccggctgctttatcacaggatactgcataggcaacacccatggattttaccagtgagcttcccattgtattgattgtatcttccacgctgtcccgcatggaaagcagtgtatctttatccagcatcttttcgtctgtcccggtctgctttccaacgagctcttttaccgcagatttctccatggcactcatctgataattcatgataagcggaactgacagtgtctcatcgatctcatttaattctgactcggatgttacctgcagacggtaaatgtctccgtctttttcatagatgctctcccagaggctttcttcatcctcagtcatcatacactttgccgtttcgaactcatccgcagtcaatgcctccggcactacatgttccacaccattgttctggataccaacatcaatgatatccgatgtgtaagacggtagtgacagatcacaccatgcctgcacaaagagtaacgcaatgataatcacaattgatttccaatatggaatcatatttttaaaaatcttactcatgttccctttcctttctgccttgccattttctagcttcaatctctttttccgcaatatggtaaatgttatccaaataagaaatcaagcgtttcatatctgcctcctccacctgtgacatcactgactttccaaaatccgacattgtctgtctggcttcctctgtcagttgtcttcctgtttccgtcagttccacataggtgttgcgcctgtcattcttgttgacattccgctccacgtatccacgctcctctaacccttttaacgttctggaaattgccggaggcagcatcttcgcccgcgcagccagttccgaaatcgtaatctgaccgttctctcctttatccatgatcgtacacagcacaaaaaagtctgtcttacacaattccggaaacatctcggaaaacttcagctttcggaattgattcatcgaccgaaaaagttcttcatataatttatccataattcactcaccgcctgtcattagttaacattgttatgtattaagcatgttaaataataacaccggcaaatatctgtgtcaagacatctgtcggtgtttataataactttataattgttacataattttatggattctctctaaaatgtccgctacctcgtgcatctccatctgcccaggtgcgctcgcctttttgtgtgcagcaaaggtaatagccgaaccaaaactctctccgcacagtcggctgatcattcccatttttcccatggacattgtaatgaccggcgtgtccggattctcttccttgaactcatacgtcacagataacagttttaaaacatcctccatattctgtggcatgactgcaagtttaacaatatctgcgcctcctgcacacatctgctctaagagcattttcatgacctcacggtctggtgtctcataaaaatcgtggtgggaagcaatgactttcaagccctgtttatgaagctttctgatttttcttgccggatgctcctcctcaaaaaattccagatcaagcagatccacgcacccggactcagccgcaagatcatgcagatcgttcagttcatccggtgcaagttctcccatgccgccctgtttttttgtgcggaatgtatataagaagatcttctctttcatgcactctgccgcagcaaacacttcccgcaccgcattgtaattcttataatcctcaaacgcatctatacgccactcgatcacatctgcctcactgcctgcaagcgtctggagttccgcaataatttcttccttctttgtttccatgactggaacacataaaagtggttttcctaccccaattgtttttccttttatctccattgatgttcccgctcctttttcctttatatccattattttaaaacactacgaatcactatgcaatggaacataaatattttttatggattgtataaaaaattggaacatctgtgaatttgacaatttattcacaatctattagaatgactgttagtataatctactaaaggagagttttacatgagtttcacatttttaaacgaattaccttctcctgcccagatccaagaaagatatcctctgtcagagaaattgcaggagttaaaaaaacagcgtgatgcagagatcagcaatgtgatcaaaggtcttgacaaccgttttcttgtcatcatcggaccttgttctgcagacaacgaagattctgtatgcgattatgtcagccgtctcacttccatccaggaagatgtcaaagacaagctgatcatcatcccgcgtgtgtatacaaataaaccacgtaccaccggtgaaggctacaagggaatcgcttcccagcctgaccctgaaaaagcaccggatatggtggaaggtctgatcgctatgcgcaaaatgcacatccgtgcaattgaagaaagcggtctcacctgtgcagacgaaatgctttacccggaaaactggggatatgtagaagacctgctctcctacgttgcgattggtgcacgttcggttgaagaccagcagcaccgtcttaccgtcagcggtttcgatgttgcatccggtatgaagaatcctaccagtggagattttgctgttatgttaaattccgtttacgctgcgcagcatccacatcattttgtttaccgtggctatgaagtggagacaaccggaaatccattaacccacgttgtacttcgcggcgctgtaagcaaacacggaaacagcacacagaattatcactatgaggatttgatccgtctctgtgatatgtatgcgaaaatggatcttgtaaacccggctgccattattgatgctaaccactccaattccggcaaacagttcaaagaacaaatccgtattgtcaaggaagtgatgcataaccgtcagttatcgcaagacatccataacatggtaaaaggtgtgatgatcgagagttatattgaagagggttctcagaagatccacgaccatatttatggaaaatccatcacagatccctgccttggatgggaagattccagaaaactgatttatgatatcgcagagatgtgtaaataattttcactaaaaaaagtctgctgacaggtactacctgccagcagacttttttcatgcaccatagagtactcatttttcattacagatctgatgaagattattccgcacgggacatagcttcttcgtaatcttttgtgcctttccagatctcttctttgtaaggattcttctttaacttcatagagcgtttgatgatcgcagcgaatacaacaacgttgaccacaagtgaaagaacagagatcacaccctgtgctgttggatctgctgctgttggatgtgtagctgcatccatgaatccatctgcgtaaattcttgggataactgcgaatttaccctgatcctggaataatgggaatacctgggcaaacatgcaccataatgctaatgtgttagcacggttctgaatccagccacctttgttccagaatgctgctgcaaatgtaggtgcaagcaataaagcaacaccacaataccaggaatgagtcggaaggttcaagtatgtatactggaagttccatacatcataagctaaaatgaacatccatgtcatatccggccataacatatcatcttttttcttggaagtgtaaattccccaccagcctgtcatacataagatattgataatacctgcaagaccgttgagaatattccaccatccgccgtataaccatacgccttcagaagataaccaccagcttgttcctgtctctgcaagtgcatgagcacctctgattgcagattcgaaatcactgcaaactgcgattaaaatgttgattgctacgataacaaatgggaaagctttaaaccactgtgttttaccaacaccccatttgtatttgagcatcataaaaccgatacatccggctgtagctgcatataacttcgcataatggaaccagcttgtcatatgtacatatgtattgttattaagtgcccattcagctcccgctgctgctgaaacgtaaattgcaataaagtaaactgtcagaataattggaagaacaacgaaacataacattccgccgacttttgtacgtctggcaatctcatttgcaagtacgagacaggcaaaaactaaaatccagccaagaaactgccatgcagctccttcgccgtaaacctgaaacaacagtccatgatttaacatattgtttcctcccttgtaaaattttttattctggtcataccagtgattgttattattttaacacttattttataaagtttcaacattatttacattttcatatactttttgacaatattgtatatcatttccagttgctttttttcattttttgcaggttttttgagaaaatctgtttatatagcacccttttccgcgtttattttgcttgatttccaagaaaaaagatgttctgtggtacaaccagagccacgaacatctttttcttacatcctgtttacttaaaatggttaagatacctcgtctgtatcaattagttttcatcctcaatcacaagcttgcctgctgtcacttccatgaatacgctctccgggtccgcctttttcatagcaagaagcaattcccacagattatggatctggtttgccagcacaccggacgcctgaattgcatatggcagcagcattggaagctggaacacacggattccaagcggtggaaggaagatcatgttggtcgtatgcaccttatctccggcggttttgatcatctcataggtgatcatcagaaaatcctgtcctttgtatttgcaataataagaaacatagcactcgtcaatcgtccaggaaacaccgtcctctacttctaccggtttctcagccgcttcattattctcggttgtctgcacactgatattccagtggattttcccttcctttgtatcattgtacatctctgtcagcatatggcttaattcttctggtcttttcattgtttttctccttgtaattcatagtttctatttttctaacgcatgttccccgatgcgcactgcatgtaccacaaaacggttgcctgttgtagaacaggtcgaaagtgtcatgatatggtcatcttttgtgaccttcactcctgtatcatcataggacttttgcagcatattatcaataaatttctgaaaggtatcatccggtgcaaagccgaccgtgtagactgcatccgtctccggcacatcataataggcaaaaatctgataacggtacgccatttccgttgtatagattgtaaaaaactgatgatctttgtaaaaatcctctgtcttatattttttcagactgccaaacatacttaagtttttcatgttgtgaccatacaaaatcgtatgataatccccaaaatccggcgtattcattccttccataaaaatacatcctgcaatggtcgaattgccataaatatcggtgcggagatatttttcatcatcccccgaatataaaaccgggtaactgatctgatcgagcttgtcaaaaagaatccagccgatgatatccggattgatttcctgcaatttttctaactgaatatccacatctgtataccacgaatcatcttcccccgtatccgccacattttcttccttatccggctgttcgttttgggaaacatagttttccttcaatgcctcataggtgtcgttcgactttttgtagttcaaaagatttggcacaagcatggcaagcgctatggcgatcagagcgattccaagaaggagaagaagtatcgtggaatggtcacttttcttttttatcatagtatccctcatttcatatgtcctgacttcgtaatgaatccggacaggtacttttttattttaccataaaatgagcagacctcctagtaataatgaaagtctgctcaaatgattttttatatttgataatccggttcagtttttagttaaaggaaacttctccaagtgcagctgtgtaagttgaaaatccggctgcctgaactgcacaagcagaaactttgattggtgtaaaggtggtatctgctgtcacatctgcgccaactgttacgttgttgaaaatcgtagaatgttctgatttggaaataatgtcttttttggcatatactttgtaatcaatatctgtcaatgactttgcatctttataatcgtctgttacatctacccagtcacctgcgtaagcaattgtaagatcaggatttgcatttacgatttttgcaaatacccatgcatcctgtgaatcagaagccatgtgtacagtcggatctttgcataccacttctcctgcaaccagatccttatactgattttcttttacactccatacattggttccgtctgcatccacatataatccgctttctgcatctctcgcaacttttgattcggataaaccgccctgcaattcctcatcaaagtttacattaccaaccgtaaatgtattgctgactgttccggttgtgctggtcaggtaagcaaatgtgctgcctgctccgattgctccgatcaaagatactgctccaagcattgtgactaattttgtttttttcataattttttgttctccttttttataatttttaataactcttatgtatgctttccaatattgttttatcatgagtcggtcacacaccggtcatatgcaagaactttcattattattattgcttatgcatgctcatttgtttttgatatcgttttttcttcctcaaaaatatccggcagaaacgtcaaaagtatcagcacgatcaaaacaccgcatacgaccgcaattcccacaggtgtctttgcatatatcgaaatgtaacccagataaggaacatgaaatgcatacacgcccacaatctgctgccaagcaacaggcgaggcatccgcgacattgttggcgtctccctgcgtaatgatagtctggtcttcctgatcgaccgaaataacacggtgcgtcaccaacgtttccggtgacagctcataggtgacgactgccccctcctctaaagtcttgtcggaaaacgctttgtcatatacaatcgctccgactgggattcccggctccatgctcccgcttagtaccgcatattggctgtatcccaagatttttggaacaaacagaagacctgcgattcctaataatccaagaaatatcagcatagataaaattccgcaaatttttttcatcatcttcttttgcgcctttctgacttattttgttacctttgcaaaaaaatcctgtatggtatttaattctgccttctcacctgcatgataattctctgcaaacactgcttcctgatacacggtgatgtcgaagttctttgtgacctctccaatttttaccgcgtcaaataaagtcccggtattctgccccggcgcgatcgggctattgtagtaataccagccgtccgccccctgataccagccgattccgtcaccgtccggatcatataacgttgtctccgtagcgatacggtctgccgctgcccctttttctgtaaaaacactgtccttccagacaccgcttaacagcgtaacatccgtctgctgtggagataccgtgatccttgcacggataaacgcatcggaaattccggtattttgaacactcggatttttctttattgtactgcctgattttacgtcaccgtctaattcttcctgaatctccgtagtgactccggctgcccggaacgtattcgttactgttcccgctgttgccgtgacaattgcaaatgttgtagctgttccaataattccaacaatcagtgcaattgtaatcacaaatatttttttatttttccatatctctttcatacacattgcctccgattattttcgcacatccgctgtaaactgattgtcaacccaggtcgtactctctgccttattgccaattacaaatttattttttactgcgtctgtatctgtcaattttccgtcgtttctggtcttgttatttctggcagtgatcttggcactgtccgccttcaaatgctggtctgccgctgtcgtgacaaaattctctgcatcaaagctgcaagcttcctcccgactgcagatacccatagcaaatttgacactgtttccattgattctggacgcacagtttgtgtccgcctcaaactcctttaaggtaaatcccattgtgtcaagttcttccacctgatagattccctgcgcaagtccttctaacgtggtctgcgctttcacattgaacaatccgtttgtcgtggtctgctcctctgtacctttttcgccaaaacgcagtgtcttgtaataaatatcccctgtcgtctggttggtgatcttaaaggtaaagaccggatctccctcactggctttgatatcttttttgctgatcttctttgtgagtgtcagcactccggtttttacttttacctcatatctgcctgcgtaagtctcgccttccactgtggcagcctccacctctgtgttatttttataaacgacaccattgatcgagcagtttgcatttgaagcgtccgttgcttcctcaaccggtaaaaatgcctttgcataatacgtgatgtctttctccggtttttcttttttcagattttccagggaaatctctttctgacaattcctatccgtatagaaaatcatatttaatttggaagcatctatgtcattgctggcacacatgcgtccttttgcatcctcggcatactgccctaaactctcgccaagaaagattgtatcctcggcatctgaaatctgatattggattctgacatttacagtcggctgtggaagttctaactgcgtgcctccaatgctgagataagagcccggattcacattcgttgtgacattatttccacccagataagcttcttttgccacaatctgaatcgtcttacaccacccggcagttccgttttcctttggcttcacttcctggccgatccagcttatcgttgtcgtttgatcctcatttacggtaacggtcgcaccgtccgctttcagacgctctatctctgcctctgtcagttcaaatctggaatcaatgacatctgtcacctgcacgccggtcagcgactttgactgcgtgatcgtactctggatcttctggaagattttatttaactcttctgctgtttccgctgtaaatgcacagcctgtggatgccactttcgtttccagccatgtggctgtatcgccgtttaaaccaagtcctacggtaatgaccgtgcagcctgctgtctttaatttctgcgctgagagttctgtctggtattgatccgagttgctcgaaggttctccgtccgaaaaaagaatgacatatttcttattgtcatcgactgcttttttcaattcctgataagcgatctctaaccctttctgcggggaagtgccaccgtcggcaaaaagagcgttcactgcctttaacatttcgttttcgtttacttttgcaagaccataatttaactttccttcggtgctgctataccacccgtttccagttccatagaaggttgcgattccaataaggctctccggggatgtttccgcaactcctgtcacaaaaccgcttgccgcatctttcagcgcggtgattttcgcattccatgttgcgatcacatcactgtcagacaggttctgataactgccactgacatattttttccaggcaccgtcaatatatttgaccggatattttgcatatttattaccggaaaccgatgtcgtacccatgccaacactttcgtttgttttccacggtccccagccactttgttcatacttattccagtaatagactttgttggtatctaatgaattttttacctgtgcaaaagttcctagatccgtcagcttgttgcttcctgacaaaatttcattcatggaaccggacaggtcaaatacaagcatgacatccacttcctgtgtctgctccacggttgtctgcgaagtcacaagggaactcacatcaagcgtgatctggtattcacgtttttcccagtctgtcagttttgccgtcttgtgatactcaacatccttatccgtaaattcgaccggtttctccggtggtatgaccggcacatcatcctccacaaccttgaccacactagcattcggaagtgtaaacttcatgttacagtttgcttttgctgctccgcgctccatatataaaacggtcagatgatgttcctgatttttatctccctgctctttgtcaatatagttccaaagatcaacggtatccgtcaatgcatcatgaataccacccagatcaatgacaacctgttttccgtctaaaatcacccagaggtcatcatccccggtaaaagaataattcagatctccaatgtaatcacccagcgtgaacgtcacatcataacgcattccaaaatagaagttgtttccgccgaatggcagaaaatcagctcccgctgttgtcgccacattgtttttatcgtctaacacttctttcagctcataagtatctccactttgtgaaaattttaactgatatccttttttgacggtcagcccaaccgtatttgcggctgtctctccgtcttttggaaacacgcccggctcgttcacactaaaaagtacttccttataatcctcacttaatccggtaacaattccggtcttctttgcattttccccgcttccggcggtataaacattaatgtgctggtctgactctgtgccgtccttatttttcttttttgtgatcgtatcgtatcggttttcctctaaattctgggatacagttcccaccgtaaaacgatcctctgttttttcagaaggataattgtcatccgcattgatacttaaatcggctctcgcctctccatttgtgtcatacgggatcacatcataatcataaaatgctgcatctgcgatatattctgccgttttggcgttataaaatacttttacggtcgaatcttcctcaatcggtattgcagccaacgcttccccggaaattgtctcgtcgtccacctgcacataatccacatcccagtttaccgccttgttgtaatctgagatttttgctcccggtgccagcacacagacatcatcactgtagatttttccactctgctcatcttcctcactgcattttctggcatcataatgttcgatcgtaactgtcacagtatcttcgccacaattgacgatcctgtatttggaagcatctgcttcgcccgcagaacttaatattgtttttaatttgcgtagtttctgctcctcgattgtttccgttgcttctgtagattctgtggattcgatcatttctgtcgtttctgtatgttctgcctcttcagtggattcgatcgtctctgtattttcagcagattctatactttccgtagattctgttgtttctgtactatctatgctttctgctggtttgattgaatcagccgtttcttttgtatccgttgatttattcttttcactttccccaacgctttctgtattttcaacggactccgatgcagcatttacctcgcgcaccagttccgtggaaacttcggttgtatctacactcgttgcattggtgaccattacatccgatgtcagcaacgcagcgcatatcaaaaatgcgattccttttttcacaatggctgcaaacttcatacaatcctccttgctcctgccctttgatctactgttttcttctcaaaagatttcatcctgtgtatttatgtaaaatgttgtctgcggtttccactttttccatatttatcttcattttcaggttccggtaaattttattttcctgataaaaattggaaataatcctgtttgcaacacttcttcctgcctcataagtgcaggttgaaagtaaaatgacatactgcgaatcactgtactgcgcagcgacatcccccgcccggagagagtgctttaacgtttctgtcagatgctgcatcgcatttctgatccggaaccactccacctcacatcccttgccgctcatcttctccctttcatttagcgtgaccaacagtaaatattccttttcatcaaatctggctgtttttcttgcttccaatctgtatatctcccggaataccggatatccgcacaaaaaaacaccctccggattttcttccgaaatatcctgatacacttcggctagtcctctcacttttccgctttttttcattttcagtaatttatcataaatgccttttaattttgtaaattcagaaattccaagctgccgctgcaaaagttcacatgccttcgtgtaaacttccatggcagaaccgattttattttcctctgccatagccctgatcagatagcaatacaaatcctcatccagactctcctttaaaagtgtccggctgcacagcatctcaagctcctcaaatctgcgtgtggagacatacaggtcacacagatacttcacgccgtttaaataaagggaatgataataagtggtcaatgttatcacccaatgcatctccgtatttttctgcatgaaatcgccctgataaagtgcaagtgctgtatttaattccaaaatggcttcttcctctttcatctgcttctgctttataccctctaacatctgctcaaactgttctgcatccacccggacttccagttccggattaaaatggtaagaaccctgttttgtcagaataaactctgtcttgccaaaatgctttttcagaagagttctcagccgatacatcagatttttcagtgcccccgccggattttccgtttcatcctccagccacaatgcctctgccagttcatcgatcgtgacggactgatttctgtgaatgagcagatatcctaaaagattggtcagttttgaagatcgtatgtcatcctcgttcaaggtatgttcttcatttttgatctggaattttcccaaagtacgaatggtaaacatgcagttttcctccccttacggcatttatcgcgatttatactaacatctgtttcagtctataaaagtcgaaaactgtactttaaactccttgttacttcgacattacaatttctctttcttattttttcactttctttttgtacacaagaaatacaattccaccgattactaaaactgcgacaattgcaccgataaccggaaccgcgacagataccgattctgtttgaagttcctgtgcggcaagcgctgcatcctctttttcaacttcggcagaagacgtttgttctgtatccggcacatttgctaacggcgtctcactctcctcaatctcaaccgtatcgttttccccgtctgctaacggcgtctgttcgtcgtcgatatcaatattttcattgtcgtctgtctgttctgccggattatttcctgccttctccaccacattcacatctgcttccacgcggtttcctgctgcactttgcggctgatttgctgctgcatttcctgctgttggcgttctgtccgcaacgtttgctgcaaattcaggtgcagctgcacttcccgggacaatgaccgtctccttaatctcatttacaaccgtttccgtccgcgttgttcccggaattacctttgtcacagtacttgtgatcgtatccacatgccctgtatagttgtattcaaacgttgccgtattctcttttcctttttccagttttaaggttttactgctttctgtcggtgtataatctgccacctccaccggcagcactgtgattgtttcctccgcatttccgtaaacgatcttcggtgttgcaatctgctccttagattcccggtctataaagcttaccgtgtaggaaaccggatcgatcagacgttcatagtccaaaacatattccgtgtttttcgaaatgacattatcagcaacattcgaaaaattctttaacctgtaaaccgcttctttttcatatttcagatagttagaaaaccatgccgtaagctttgcatctgtttcccagctttgcactacagatgtaattttatctccttttgccacttttatttttatatagttttctgtcacttccgttccctgcggaagattgattttatccagatcaaagaccgcagcatttccagcacgaaaagtcaccgtatagcattttttctctgctgttttctcagcagaagccttgactgttgttaccggaagaatcattgccatgaataaaaaaatggtaagaaacccggtaatcatctgtttcatttttttcatgacctgtgttccacctttctttttttcattgcaatcccgacaatcactacgccagcgatcagaatgcctgtaaatattgttacggtgagcgtatctcctgttttgacagcatgtgccagcggaacgagctgttctgtgattgtttttggaatcactttatttacaattttcgcgagaaccgtatcttttccctgctccgtcacataattggtaacaacaaccggtgccctgtcatctgcataataagcgcgaaattcaaactgcatggcgccggttgccttcgaatagtcgattccatttgcgctgtccattccttccccgtcaagtgtcagtgtcacataaacattcgtcgactgcccacaagcaagttctgtcacataacggtactcattcaattcggtgatttccgccagtccctctatacttgccacattccctgcatatcccccggcactcgcatctaacagcgatgtcttgttggtgtcatcaccaatctcaacccgaaattcataagcgccgccggaagattttcctgcctcttccaatgcatctgttgttttctgcgacaggaaaaaagaagccttatgcgcattgttgttttcaattttgatcacagcagtccggctgtctccgggtgccattccttcgaatgcttttacaagctctgcattgtcttttgcatatacaagctgattatccttcgtcagctgcacagtctgaacttccgccgcactggccactgacgatactccacagatcagaaccagcaacagtccggctgcgatgttttttattttcatatactccaatctccttcaaccgttatcttgtttctgaaacagacagaatgttccctttttcatcaaacgttggaaatacaccaagctctgctgctattgcatcttctgcgttatttgcctgaactgctgtaacttcgtactctaatgtataagttgcatccgcaaattcatttcccattgattcctgaaatagtattccgtccataaaattcgatgtcgtctgatctggtgccagcggcttcgtataatacaaaatcatttgttcctcatctgcatattggacaagccagtcactgttatgtacatagatactgtctgccttctccgcttccacaggatttccgtcttttttatcccatgaatggtaaatcactactttcacatacacatcatagccatccgggatattgttttttactgcacgctgcatttcgatgtcatctcccggaacgatcgttaccggctcttttttgctgccgtctgccagtgcagccggttcatctttgatcaccgtaactccgacacttttaatcgaaatatttgcaattgctttttcactcttggtatttaaggctgccagtgttcctccgaccatcgttgcaagaagcagcactgccgcgatcgccataagcatatattttttcttcacgctccatctcctccgtttatccatagaattattttatgaacccttgtgttattatatgaatgcacggtcacaccgtggtcacatcaatgccaggttttttactctacagatgtagtgcaaagcaatctcctatgacagagcaataaaattgtattacaaagaaaaaacctcctgagcagtccgggaaaaatcccagcctgttcaggaggtttcaatactctcttttctattctgttatgtaaatctatctcacgtagatatgagaaaggttttctaaaatttctccggcaacatccggtttgttcattgtataaatgtgcacatggttcacaccgtttgcgatcaggtcaatgatctgctctgttgcatatgcgattccagcctggcgcattgcagccgggttatccccgaaacgatccacgattgcaagaaatctaggtggtaccatattaccggataaagatgtgatacgtttgatctggcttgcattggttactggcataatacctgctacaatcggaacatcaattccttttttcaatgccttatacatgaaattgtataaaatattgttatcaaaaaacatctgcgttgtcagaaattcgcatccggcatctactttttctttcaaatgatccagatcctcaaaaatagtagctgcttccgggtgtccttccggataacatgcaccgccgatacagaaatcgccctgtgctttgatgtctgcgatcagttcacttgcatgcttgtactgatcaggcagtggaaaatctgcgtttgcaggaatatccccacgcagcgcaagaatattttcgatatgggctgcctttaattcttcaatgacagaagaaactttttcctttgtggaggatgcacaggtcagatgtgctaatgcaggggtattgttgttgcgcacttcctctgcaagctttaccgtataatcggatgttcctccggttgcaccgtaagtaacgctcatatatgccggcttcaacgctgccatatcctttacaatgttcttataattttctaactgcgcgtcctgtttcggtgggaaaagttcgcaggaaattgttacttcatctttgtttaataattctgttaatctcattttttgttcctctcacttgtactcattctatcatgaaactctacttcatgagcaacattcgtcgctcgccgaaatacataaatgcactcattctttaaaagcttctcagcttatcacttccgtcgtctatcgtattctcgatcttgcgtatctcgacaaaataggaataattatcgtttacttttacctcgcagcggtctccaactttgtgtcctaataatgccttgccaagcggtgactcgttactaattagattttttaaagaattaccacgaatggttgtgacaatcttataagtttcttcctcgtcatcttcttcaaaataaaccgtaacggtattgttcattccaacttcatcgtctgcggaatccgtagagatgatcttcgccgtcttgatcattttctccagatagcggatacggctttcgttttgatttttatcttttttggcagcgtgatactcgaagttttcactgagatccccatgtgcacgcgcctcttttactgcttctaatgcattttttctgacaaccagtttccgatattctatctcttcttccattttcttaatatcctgttcggtcaactcgtcatacatgaatctatcctccatttttctgacttcgccgcttcttccgacaactcaaatgcgttgtcgccacctcatgtgcggcgttgtccctgctcattaatatagcatatttttttcttgaaattcaagctttcaaagcggtatttcctcagggatacactcaatctgcttccccctacggcacaccgacagccagacatccggctttatctcccatgtttttagggcatagtcctccacccactcctccatagtggaaaaggaaggaagcgccatcgcaatcccggttccgaccgccttaatgtaggcctcttttctcgtccagatgcctgtaaatacagaatcactccagcattgttctaaataccgtttttcttcttcggaaaaaaaacgccttgcgaccttctgctttccctcgcgcagacattcgacatctaccccgacaggcttttcatcaaatgcggctgccacatacctgccggaatgactgagattaaaatgcactttaccattctgccctttcgcatccacaagcaatggttttccgttctctccatatgaaaatgtgacctgctcatatggatgctctttttccccgacatccggaacctgagtgtatccatacgctcttaatccatattctaataaaagacccgcaccaaatgcacgcagcctgtcatcctcattcttacactgcgtgatctttttctgcctgctgctgcacaaaagcttccacatccgaggatgttctaactcctcacgcagcgctgtaatatccgcataaaatatacgcagtccgttgacactttccattatttctgatgctcctgcaaaacttctttttttcgtcttgtagaatctaaaacattctgcacacgtcttgtgacgatttccggaataaatggttttacgatataatcgctggcacccatttccatcgtctgtacctgctgctccgtcgtatcatccgctgtgatgatcacaaccggaatattcaagagttttggattcttctctcggatctgcataaaagtctgcccgttcatgccaggcatcatcaggtctagcaggatcatatcaactttgtaatctttgtcctctaatatccgaagcgcttcctcgccgtcgcctgcctgcacgatctgatagtctttctcgaaaatgctctccaaagatgccctgttaatttccatatcatctactacaagcatcgttttatcatttgcatcctcttcctgtaaggcaagtctgtacttcgtcaactcgtcatccatttccttctggcttgtaatatcatcaatacagccaaaaataatatgtctgtcgccaaccttattaatatatttcagccggagtttgatccagatttctcttccggaatctaagtttcgtttcacttcgcactccgcagcttttccattttcaaccacccgcgaaaaagtgtcgagaaatcccgcccgatcctcctctgcaatggattgttcaatctccttcatcacataatctgtatcatgatatccaaacagatcaaaataagcgtcattcacacgcaccacttcaagatttccattgcggtattcataaatagccgcagcctgcagcatattggaaaaaatcatttccatctgcatgtttgcagtccagattacattcgtgtcatccgatttttttctcgtctcatcatcttcaaaatacggctgttcatagagcagtttctcgtattcttctaccggcattggttttgcaaaatagaatccctgcacatattcacatccaatgctccgcaaaaatgaaacctgttccttccgttctgcaccttccgctacaaccggcatattcagccattttgccatacggacaaccgatgccagaatattctcgctcctgccgtcatccgccgaaccgtccagaaacttcatatcaatttttaaaacatccactgcaatgtcctttaacacgttcaaagacgagtaaccgcttccaaagtcgtccatcaaaatggaaaatccctttttctgaagctgctccatcatctctttgattgcctttgggtttgcagtataggcactttctgtcaattctaactgaagccattccggtggaatatggtatttctcagtcagaccactgatcacttccacgattcttggattgtaaaggcttactctggatatattgaccgaaaccgggaatatttttcttccctcgtctctccattttgcaagcagtttacaggttttctcccaaacatactgatccagctttaagataaatccattccgttcaaataccggtataaattctcccggcgatatcatcttcccttcggaggtgatccagcgcactaagacttccgctccggcaatagaatttttctgaagttcatacttaggctgcaaatacagcacaaattcctcgtttttcagcgcatttttcatattgttgatcacgcgctgttcccgaatgatatcttcgctcatctcttttgtataaaagaaataattctgaatgtaatttcccttgcagttcttagaggcaagatttgccttatcgtacatctcgttcatggaaagcttccggttttgaaccagataaattccaaaaaacggcgtaatatcaaattccagcggatatttttccaactggtttgtgaagttcttcacaaagtctgtgatctctttttcatcctgataagaaaagcatatcgcaaaaatatctgcctcgattcttccataggcgacataccggaatccttctgacgcttcctgcagatgatgtgccatatattttaataaattatcgccctcatccataccaaaaaaggaattgatcagctggaatttttcaatatcaattcttataaaagcaaaattctccgtaccgaaaatattcagcatattccgcgtgttataaaagaattttgatttgttataaatgcctgtgagcacatcatgctccgcacggtacttcaattcatcatccactcttgcctgactgcggtcgatcacgttttttacacgaaaacgaacgatcgttggatcatacggtttccgcataaaatcccatgcaccatattccagacatttgcactcgatctcatcattgatttctctcaacattgtaatcacaggtatattctgatatcttgcatccttgcgaaaaatttctaagagttccagtccgctcatgtccggcatgatcaggtcaagaatgatcacggttaccgcctgatacttctcctctaaaactgctaatgcagtctgtccattttttgcttcaagcacgatataattgtcatttaaaatgtcccgcaatgcagtcctgttatgtcttgcatcatccacaattaatattgtattttttcctgtcatatgcccttgtgccagtccttctccatttgtagtggcttcagccacctgccaaattcattttatcttccgttccaaacatatatttatatgataacagacttattttttcttttcaatatgaagagactccaattttgtaagccttttcatttaaaaagcacgatctaaacaccaacattaaaaactcatataggaaaggtataattcttcaaaatttttatcttctgcaagatttactacagttgtcattcgctgtattttgtccatttcttctcttgtaattttcccggcaagtacctcttttgttccggcaagcactgtgtttccaactgctgttgttttgtttgctaattcttccgggataagaccaatgcctgctgcttttctgatatcaatttttgttccaaatccacctgccagataacaatgctccacgtctttataggtgatcttcgcctcttttatcagaatatcaagaccggcgcggattgctgccttcgccatctgaagttcacgcatatctttctgtgtaaattttaccttttctgtgatctcataacccgtatcaaaatatgcgtccgaaaaagttccattttcatcgattattccatgtttccgaagttcataagccagatctaccattccggttccacagattccaattggctgcattttgctgttgttttccagattatgatttctccaaataccgttcttctggtcaatgtttttctgacctatcatctcaagctgaacttccccggcttcattcatggaaatatgtgaaatcgcgccggaaacgctcgccataccgcaggagatatttcctccctcaaatgccggtcctgctgatgtggatgtcacatacatctggttactgtttccaagcaccatctctccgttcgttccaatatcaagcagcagattctgtttttctgttttgtgcagattcatatctacaattcctgccataatgtctgcgccgacaaacgctgagattcccggcaatataaccacttgtgcgtccagttccttcattccaagaaattctgatgcgctgccttccatccacgaaatatccaccggttcaaatggagccacacccagcgtctcacatgaaaacccgcgaagcagatgacacatcgttgtgtttccagcgatcacgatcctttgtatctgttgttctgttatcgtttctttttgaaggagttccctgatcagtttctgaagatcctgccggatacaacgctgcatctcccatttttttccattgttggaagcgtccattctggaaagcacgtccgctccataagttctctggtgattaacggatacggcagtctggcagtctgcttctgtttccagattcacaagcagtgccgccagagtcgttgttccgatgtcgatgcagattccataaattgcattttctgttttttctgccgttccttctactgtttcattgtcctgtatgccaccacttgatttcgcttctgccggcgtttgcgtgtaagcttctgtaagtccttctgtgtccgttgtctgcagcttctcccactctgaaaggacttctatcgtttcctccggctcaggaatttcaacttcatatataccagttggataagattgacaggcaagacggtatccctcatccaattgtttttccgaaaagatctccctgtcccgccgcgttgattctgttgctccacttttgtaccgcacaatgcattttccgcaggttccatttccattgcacggagcactgatgtattcatttttttcctgtaacatttccagaagatttttctgttgttctacctgaaaagtttttttcataggaatacctcatttcaaatagtttgtctgctacatccgatatcgcaaatctaatttatacgttccatcttttactgtaatatagtaaatttttccttttccactttcatctgaaagcatcacataacgtgtacaatcgctgtcaaattgtttgtattgtaatgattttatatcaatcttattttctttgtaatattcaaaatccgaagctaaattttcttcaacattcttcgctgttgcttcttcctccagtccaagataggaaagcgaagcaagcgtttcccaatcactgtcttgaattgctttccatacttcttcacagaaatcattcaaattgtccttacatatgtattgatttcctgtaaaaggaagcacatggcgacgcaatcctactatcttcacttttttcggatttgactttctgtaataaatatctccaatgacatactttgcatccacaccggaattcctcacttttgttttaagggaaactggtatatccaaatcgacatgatacttcttcccatccactttaaagcttacatctactttataattattagaatctgtcgtggttccatcatctgacagattgtcagttcgataacttctgacatacccaacttcataattttctggtgtcagctttttataaaacaaacaggataaaaatgcctgaatcacatataatgcaatccagataatcaccatacagataagaatatatataattccaccatatttagaatgatccagaaactttttgcaccgtttcaacatattcctaattaacctctctaattcatttttcctcagtatgcagaaaacccgatgattaagtataatcatcgggttttcgcaataagtctgcctcttacaaacctattttttatacacaaccttctccaaagaatgagtactcttatttattgctgatagctgcctgagctgctgctaaacgagcgattggtacacggaatggtgagcaggaaacataatctaaaccaatcttgtggcagaattctacggaagatggatctccaccgtgctctccacagataccaacatgaagttttggattaactggtttaccaagcttaatagctgtctccattaatttaccaacaccgttctgatcaagttttgcaaatggatcgttctcgaagatcttggtatcatagtaagcatttaagaacttaccagcatcgtcacgggagaatccaaatgtcatctgtgttaaatcgtttgtaccgaagcagaagaaatcagcttctgtagcgatctcatcagcagtaagagctgctcttgggatctcgatcattgtaccaacttcgtactctaatgcaacgcctgctgctgcgatctcagcgtctgctgtctcaacaactacgttcttaacgaattttaattcttttacttcacatacaagtggaatcatgatttctggttttactgtccattctggatgattcttctgtacgttgatagctgcacggataacagcttttgtctgcatcttagcaatttctggataagtaactgcaagacggcatcctctgtgtcccatcattgggttgaactcatgtaaagaagcgatgatgttcttgattgtctcaacggatttaccctgagattttgcaagtttctcaatatctgcttcttcagttggaacgaactcatgaagaggtggatcaaggaaacggattgtaactgggttaccttccagtgcttcgtaaagtgcttcgaagtctccctgctgatatggaaggatcttctcaagagcagcttctctctcttctactgtatcagaacagatcatctcacggaatgcagcaattctgtcttcctcgaagaacatatgctctgtacggcaaagaccgataccttctgcaccaagctcacgagctttcttagcatctgctggagtatctgcatttgtacgaacttttaatgttctgtatttatcagcccatgccataacacgaccgaactcaccagcgattgtagcatcaactgtcttgatagctccatcatagatgttacctgttgtaccatcgatagaaatgaagtctccttcatggaactcttttccagctaatgtgaatttcttattttcttcgtccatagcgatatcgccacatccggatacacagcatgtacccataccacgtgcaactacggctgcgtgagatgtcataccaccacgtactgttaagataccctgggaagctttcataccagtgatatcttctggagaagtctcaagacgtactaatacgactttctctcctcttgcattccattcctcagcatcttctgctgtaaatacaactttaccacaagcagctcctggagatgctccaagaccttttccaagtggagttgcagcttttaatgcagcagcatcaaactgtggatgtaataatgtatctaagttacgaggatcgatcattaatactgcttcttcctctgtcttatgtccttcatcaacaaggtcgcaagcgatctttaatgcagctggagctgttctcttaccgttacggcactgtaacatgtaaagtttcttgttctctacagtgaactccatatcctgcatatcatggtagtgattctcaagagtctcacatacttttaagaattcagcgtaagcttctgggaattcctgctccatctgtgcgattggcattggagtacgaacacctgcaactacgtcttcaccctgtgcattgattaagaactcacccataagtttgttctcacctgtagctggatcacgtgtaaatgcaacacctgtaccagactcgttatttaagttaccgaataccattggcattacgttaacagcagttccccaggaatatgggatatcgttgtcacgacggtaaacgtttgcacgtgggttgtcccaagaacggaatacagcttcaatagcaagttttaactgctctacaggatctgaagggaagtctgttcctaactggttcttgtactcagctttgaactgctctgctaattcttttaagtctgctgctgtgaggtcgatatcgaatttaacgcctctttcttctttcatcttgtcgataagctgttcgaaatatttcttaccaacttccataactacgtcagagaacatctgaatgaaacgtctataggaatcgtaaacgaaacgctcgaatgctggatctgggttaccagcgatcatagctgctactacttcgtcatttaaaccaaggtttaagatagtatccatcatacctggcatagaagctcttgcacctgaacgaacagatactaataatgggttcttaagatcgccgaatttctttccgttaatctcttccattttcttaacgccttccatagcctgagccatgatctcgtcgttgatcttacgtccatcttcataatactgtgtacaagcctctgttgtgattgtgaatccctgtggtacaggaagtccgatgcttgtcatctctgcaaggttggcacctttaccaccaagcaggttacgcatggtcatgtcgccttcgctaaacatataaacccatttgtttgccattttataattcctcctaatataaaatactgtaacttttattcaaacagaaagcattagcttctgttcttgtcacaagtatgcgcgtttttccaaaacgcacatacttataataccacacattaaccaaaaggcaacaacttttttgcttcttttcgcctattttttatgcacatttcacaatttgaaatcatattccatattatgaaactctttatatcttaccactcgaatttctttgcaaaataagcatcaagatcttcgatcttaattctctcctgctccatagtatcacggtcacgtacagtaactgctccgtctgtttcagattcgaaatcataagttacacagaatggtgttccgatctcatcctgtcttctgtaacgttttccgatatttcctctgtcatcaaattcacagttatatttcttagcaagctgtgcatataccttttctgcaccctcgtttaattttttagacaatggaagcacaccgatcttaacaggtgcaagtgccgggtggaaatgaagaacggttctcatgtccggtttttcctctgtaccgatgttctcctcatcataagctgcgcataagaatgcaagtaccacacggtcagctccaagagaaggctcaataacatacggtacatatctctcacccttctcatcatcaaagtaagtgagatcctgaccggaaacattctgatgctgtgtaaggtcataatctgttctgtcagcgattccccataattctccccagccaaatgggaataagaattcgatatcggttgttcctttgctgtagaagcagagttcttccggtgaatggtcgcggagacgcatctcatcttctttgataccaagagtcagtaaccagtcacggcagaaagctctccagtactggaaccactcaaggtctgtacccggctcacagaaaaattctaattccatctgctcaaactcacgggtacggaatgtaaagttacccggtgtgatctcgttacggaaagatttaccgatctgaccgattccaaatgggattttctttctggaagttctctgtacatttttgaagtttacgaaaattccctgtgctgtctcaggtcttaaataaactgtgttctttgcatcttcagtaacaccctggaatgttttaaacattaagttaaactgacggatgtctgtgaaattatgttttccacaggttgggcatggaatctgatgttcctcgatgaaatctctcatttcttcctgtgtccatccatccacagagccctttaattcaatgttcttctcagcagcaaaatcttcaatgatcttatctgcacggaaacgctcatgacattctttacagtccatcaaaggatcggagaatccgccaagatgtccggatgctacccatgtctgcgggttcataaggattgcgcagtccacaccaacgttataagggttttcctgaatgaatttctgccaccatgctctttttacgttgttcttcaattctacaccaagattaccgtagtcccatgtatttgcaagacctccgtaaatctcagaacccggatatacgaatcctcttgattttgcaagtgctacgattttatccatcgttttttccataataaaattcctcacattctatttttatttacttataaataatataagtatagatatctgtgccaaaagaatctcctgaaagattcgtcacaacctcattctccgacggctcctctgttccaatgatcacttccgcctcgatcactttctcatcggattctgtgttctccaatgatgccggttcctctgttgccggtacttcttctgactctgtcacccatgttttttcaatcccggttccatctttgattgaaacggaatcttttccggtaactgtcacgttatcgcaggaaacatataaaatctttccatcaatctttacatctgtatttgccttgataatgacaacttttaaatcctcctgtgtaaggatttcctcgcgcatcacacctgtgacactgccatcctctgtcacgccggcaaaatctgtgtcaaaatcatacccggcagctaatgcctgtacgattttcccctgatacagttccacaccgttaaacgctgtataatcttccaccgtctcataatccatccggagcttcgctgtgccgtcttccacggtcaggtcatccacttttacagaattttttccatttccggtattgtattcctccaccgcagagtccacaaactctttcaattctgtttcatcgtaataagactggtcaagctgctccacatccatggaaacgactttgccatgttttgaaacataaactgtattcgtgtctgcctctaaacttgaaccacacccggcaagcattcctgcgcagatgataatggtcagtccaatgcatcctaatctcttcatgatacagactccattcttttcctttttcatttcatgttaatcttggatattatacaatttttacatcatgttttcaacctcttccaaaattttaagtgatttgaatgaatggttgacataatacttcatatattctttaaggcagtgctgcagctcgcgcaatacctgatccgatactgaaaacgtatatagttttgcaagatttactgtcataatgtactgcattgtataaaccgtggactcctgcactttctgataggcaggcagggctgacatagtttccggttttttctttaattcctgcacacaactgtcgcagagcatccgtgcagtcttcccggaaaaccagtgcagtttttctttttttccgcattttgtgcaaccaaaaacgttcggagcctccccattgattgtaagcgcacgaagctcataaatgcattttaccagccggttggaaagagccggactctccagtgcgcgcagtgtctgataaagaagttttagcatctctttttcatcgttattttcctgacaataatagtctgcaaattccagaaaataaaatccgtaatatgccgcatcaaaatctgccgcaagttcccggaaataattctgaatcgacacttttgcaaccgtatatgtagaacgtccctcaaaaagttcaaattctccaaaggagaaaggattggtagcagccagaaactggctgtttggctttcttgcccctctggcaaatgccgtgatctttcctctctcctttgtgagcagtgttattcttttgtcataatcgccaatcggcatcgcatttaagaccattccggtcactaccaggttttgccccattctgccttacttcctgctctctgtcactctctttttctctgcatatcttcagataatcgtcaatccgtcctgtttccaaaaatgtgttccaggttttctccatcgttgttccctcctgccgtctgcaaaaggaaaccttcaaactttatgactgcgccgctctttcagtttcccctgcatctctttcttatgatgttattaggatttacgctgaaacaaaccctatacacgtcaattattggaaatggatcagatttcgtccttattgtaaccaaagtttttgataaggaaatcgctgtcgcgccagtctttcttgacttttacccaaagtttcaggttcactttggtatctaacagccgctcaatttcataacgggcattgcttccgatttttttgagcatcgcaccgccttttccgatgatgattcctttgtgggaatctctttcacagacgatcgttgcatcaatgtcaatgatgtcctgtccttttctgcccttcatctggtcgatatagactgcgattccatgcggaatctcatcatctaaagcatgcagtgccttctcacggatgatttccgcaacgatcgcacgctccggctggtctgtgatcgtgtcttcatcatagaactgtggaccatatggaagatatttaaagatcatgtcgatcactgtatccagattttttgcgcgcagcgctgatgccggaatgatctctgcaaaatcataaactttgcggtatgtgtcaatatactctacaattttttcacggtctaccgtatccactttattgatgatcagaatgaccggagtttttacctttttcaactgctcaatgatatgctgttccccggcgccgataaagtttgacggttctaccagccataaaatcacgtccacctcatttaaagtgtgctctgccacattgaccatgtactcgccaagcttattctttgccttgtggattcccggcgtatccaaaaatacgatctgtccgcgctccatatccgtgtagaccgtctggatacgatttctggtggtctgcggtttgttggatgtgattgcaattttttgtccgatcaaatggttcattaatgtggattttcccacattcggtcttccgatgatcgttacaaatccagatttaaagtttgcgttcataaatttcctctctttgtatatgttattctgtcagatgtttcaaattatcgaacatatcctcatgcgcctgcaaagtttcctcattcccgatgacacaaagatttttctcgtccagcacggatgcgatcatgtctttgagattgcggatatcctcctgtgtggcatggatcacctgatcacgttctttttgtatctcctcataggaaatgttctgcaagtaagctgccatagaacggtcaccttttgtgcttgggttcatcgggatatccatgtcactgatcgttccgatgatatatttcgtcatgtcccgctcatccgccgtaaactgctcaatatatgcagggattccgtcataaatctcatttgttttctccaggtttggatcacggtaagaaacaaaataggtgtctccgtttttcatatagccattcatgcagccgtaagcgccgcccttcacgcggatgttgatccagagataatcatattccatgatcacctttaagatgcggagtgctccatggtactcaaagccatgcgcacggaagtttccggctctcgcaacatacattacctgggaagcgtccatgaatccctcgtttttctgtaccgggataatctctgcctttttcgttgtttttgctgtttcaaacagcatcggaatgaatttttccagttctgccgttgcaatggaaagtccttctttttcacaggtaacactgactaacaggttttctctcgtaaaaattgcttctgtcaattcttttaattttgcgatcagtgcctcttttctttcctcgaaatgagcttccagatcacacagcacctcgtaaaaagtgatcgtatccttataggcagccgccttggaaaaataggtcatggctcttgtcgatgccacggaatgtcctgctgaactgatgcttacctgaagtctggattttaactcggcaatgatctcatagagacgcttctcatcgcaaagcttcgatgtaaaaagcatttcttccatgagacttactgcctccggcagtttatcgtataatgccttagtgcgcacctcgaattttactttatagtcatctttctctttgacactcggataaaccccgatcgtacttccgattccacctgtatggatgttcacctcgttggagaaatctgcataagaataattttttgtatccacatagcctagtaccgcttttaacacacccagatatggaatatcctccgccgggatatgcgcaatatcaaacagcatggtcaggtaaataataccattggaaaaaatatcgtggtggatcaccggaacctctttcacggaaagttctgtattataaaaaggtgctgcctcttttttcatatcagagcgcgcaagcatcggtatcttctctaaatcttccttcaaagaaggtgtttcctgatactctttcaaatggctggtgttttccaccagcttttttatctcctcctctgacagacctgccttgtactctgcaagcttcttctccagcaccgcctcatttttcgcatttaagcctttctccggctcaatgatgacaacggatgcatgtttattatctaacaggtacttctggatcagctgctcaaaataatcggtattcacctgctcttttaagaaacggtatgtgtcaagtgcttccagatgtaaaaacggacgcatatcatcatacagccagctatccaagcactggattccatataaaagtccctttgggaaatgtccaaagtcagcctctctgtaacggaactcggaactgttgattcctgccagcagagattttttattcagaccattttttaccagtccttctaacgtctcacggatgacagtaagaaaatgctctttctcctccggattggtgttttttgcaataatcgaaaaagttggctgtaacgttccgctgtcataaccgcctgtgatctccgagccaattcctgcatcgatcagcgcctgttttaacggtgctcccggcgcactgactaacgcataatccaaaatatcaaatgcaaggtacagcttctcatctaacgctgtctccaccaccgtattataagaaagataggtgttattttcttccgattccgtagaggaaatcgaatacttgtgtgtcacttcaaccggtttttcaaacggtttttgtagtttgatctccgaatcaagttcaattgcctcatatttactcagatactcctcatccatccatgccagcttctcagccacatccatatcgccgtagagatagatgtaggaattgcacggatgataatatctgcggtggaaatcgagatactcctcatatgtcagttccgggatatgaagcggatctccgccggaaacattcgcataagtcgtatccgggaacagggaagtcatgatctgacggcttaacacatcatccggggaagaaaaggctcccttcatctcattgtatacaacaccatttatcgtgactggagcatcctcgctctctaactcgtaatgccagccttcctgcttaaaaatctcctgatatttataaatattcggatgaaaaaccgcatccatataaacactcattaagttctggaaatctttatcattgcagcttgcgatcggatagattgtcttctccggataagtcattgcattcaaaaaggtatttaacgatcccttgactaattccacaaatggatcttttaccggatatttgtccgatccacacaaaacggtatgctcaatgatatgtgccacacctgtcgaatcttctggcggtgtccggaaaccgatataaaaaaccttgttgtcatcatcatttgaaatcactgcgattcttgccccactttttttgtgacgcaaaatgattccctctgaattgagatctttgatcgggcgtttttctaaaatttcatatgcctgtaaatcttttaactgcatctgtctgtcctctctctaatacatactgttttatagtataccacaattttgggcattatcctatttttatttttcaaaaaaaggactgtaattccggtactttttcgtatccggtattacagtcctacatttttagattcgcttctatgaattaaccttactgaaataaggtacgagtgaacagtaacgaattaaccgatgcgttttacgtgcgcagcctgaggtcctttcgcgccgtctgtcacttcaaattctaccttctcaccgtcttttaactctttgaatccatccatgtctaatgctgaaaagtgaacaaatacatcattgccctctgcatcagaaataaatccataacctttttttgcattaaaccattttacagttccctgctgcataacaaaatcctcctaatacactaaaacctttttgtattttcgacatgttttgtgcatgtcacacaaaatgaagttagcatatatctgtttttttgtcaacaactattaaatataatttagcccggtcataagaccgggctgatatttactgtttgatctgcacatcaatctgctgatacggaatcgaaatatgattttcatccagtgcatatttgatattttccatcaaccgccacttcgtatcccagtaatctgctgtgtttacccagattctaagcccaatgtctaccgaggaagctccaagattatctacaaacacaatggcatcctcttccggcagtcttgccggatcatttctgccgatctcatataaaatattttttgccgtacggatatctgcttcataaccaatacctaccacaatgtccacccgccgtttatccatatgcgatacattgaccagactgctgttggacagattaccgtttggaatcacgatcattttattgtctacggtctttaacttggtatagaaaatagaaatctcgtataccgttccttcattcgagccctcaatgatataatctcctaccacaaaaggtttcagcaaaagaatcaacactccgccagcaaagttggaaagacttccctgcagtgcaagaccaaccgccacaccacaggaaccaagcactgccaccgctgaggtagttgctatcccaaacagacttaagatcgtcatgatcagtataaaatacagtgcatattttaccactgccgacaagaactgaatgactcccacatccgcatttctgcgctccatcgtttttcttacgatcttaacgatcagaccgatcagttttgctcccactgcataaacgataattgcaatgacaacctgcaatgcaaaattcaaaagatctggaacaaggttttgaaaataagtgcggataatccccggattttttgcaacctcctgaagattctcctgcgcttcggcaatggcctccactgcctctgttgtatcaattgtcagcaacatttttctgccctcattttattttactttacgaacttttaaaacaccttcgatattctctaatttttcgatcacatcatctgtgacaggagaatccacatcgatcagtacatatgcgtaatcgcccttggatttattggtcatgcctgcgatattcattccggcatctcctaaagttgtggagtactggctgatcataccgctgacgtttctatgtaaaataccaattcttcctgctgttgtacatgctcccatagagcagtccgggaagtttacggaatgaacgatattaccgttctccatgtaatcacggatctctctgactgccatgatcgcacagttatcctcagattctgctgtagaagctccaagatgtggtgttacgatacatccttttgctccaaccgttgtcggatttggaaaatcagatacatattttttgatttttccggcagccaacgcttccaccatagcttcttcgtctacaagaagatctctggcaaaatttaaaacgatcgcatttggtttcatcatggcaatcgcttctgcattgaccattttcttcgtggaatccaaaagtggaacatgaatcgtaatatagtcgcactcccggtaaatatcttccacgttgctgatgtgctttacgcttctggaaagattccatgctgcactgacagaaatatatggatcataaccatatacatccattcccatatggattgctgcatttgcaactaacacgccgatcgctccaagaccgatcacaccaagctttttacctgagatctcagttccggcaaaattctttttctgtttttctgctgtttttgcaatgttctcatcattctggtttgcaaggcaccagtcgataccgccaacaatatcacgggatgcatataacattcctgcaaaaacaagttctttgacaccgtttgcgtttgctcccggagtattgaacacaacaattcctttttctgcacatttgtctaatggaatattgttgacaccagcacctgctcttgctactgcaagcaggctgtctggaagttcaagatcatgcatcgcagcacttcttacgagtgctgcatctgcctgatttaagtcttctactttttcatagtcatttgagaaaagatccaatcctacggatgcaattggatttaagcagttatatttaaacattacgcattttcctcctcaaacttcttcataaattctactaacttctcaacgccctcttttggcattgcgttatagatagatgctctcattccaccaacagtacggtgtcctttcaagtttacaaagcctgctgcggctgcttcttttacaaacttggcatctaactcttcattgccggtcacaaaaggaacattcatcagggaacggtcttcttttctgacggttcctttaaataatttgctctggtctaagaaatcatataagatttttgctttctcttcgttgcgctctttcatcacagaaagtccgcccattttctttaaccatttgaacactttgccgcagatgtaaatattgtagcaaggcggtgtattgtaaagggaatcattgtctgcctgtgttttccattttaacatagttggtgttcccggaaggacgtcatctgtgatcagatcttcacggataattgcgatcacaactccggcaggtccgatgttcttctgaacaccgccgtatactacaccataatttgtgacatccattggttcagacaaaaagcaggaggatacgtcagatactaagatcttgccctttgtatttggaagttttttgtattttgttccgtagattgtattattttcgcagatgtatacataatccatatcatctgtgattggaagatccgaacaatccgggatataagagaaagtctcgtctgcggatgaagcaagttccactgcctctccatagatttttgcttcctggaatgctttcttcgcccactgaccagtcagaatgtatccggctttgcggtttttcatcaggttcattggaacctctgcaaagaactgggaagctccaccctgtaaaaagagtactttgtagttatccgggatatttaagagatctcttaaatcctgctctgcctctttgatgatgttgtcatacactttggaccggtggctcatctccataacagacatgccgcttccctgatagtctaacatctcatctgctgcttcctttaatacttcctctggcagaacggctggtcctgcggaaaaattgtaaactctgctcataatcattactcctcctgtttctttttcaagtcttccccggtaaaagcggaactgattgcttcacccggagcaaccattggccataccttgtcatcactatttatgatacagtctattacaaccggggtatcagatgcaagtgctttctttaaaacttcgttaaattcttcacgatttgttgcacgataaccggttgcacccatagcttctgccaattttacataatccacaccgtcatctaaaacggttgcagaataacgtttttcataaaacagatcctgccactgtcttaccatgccaagcacatggttattgatgatcacttcgatcaacggaagtttctgtctgactgctgtggcgatctcgttcatattcatacggaaacatccgtctccggcaatattgatgacctgcttatccgggcatccgatctgtgcgccgattgcagcaccaagaccatatcccattgttccaagtcctccggatgtcagaagtgttctcggctttttgtatttgtaatactgtgctgcccacatctgatgctgtcctacctctgtcacgatcacagcatctccgttcgtctccttgtagatctcctcgatcacataaggaccagacagacctgttttcgggtaagtcagcggatattttactttgtaatccataatatgtgtgatccattccgtgtggttcatctgtatcaggcgatcattcacacgctgtaagatttctttgatatctccgatcacagatgcatcggtctggatgtttttattgatctccgcagggtccacatcaaactgtaaaatgtttgcctgacttgcaaatttctttgcattgccaagcacacggtctgaaaaccgaacaccgactgcgatcaaaagatcacattcactgacaccaagattggatgccttggttccatgcataccaagcattccggtataaagatcatcctcaccgtcaaaagcaccctttcccattaaggagtcacagacaggtgcatccaccatttttacaaacttctttaattcctcgctggcgccggagatcactgctccaccaccgacaaatatgtacggtttctttgccttctggatcattttgaccgctttatttaaatcttcctcggtaatggtctgtgaaattcttgcaatcatttcaggctcttttgccttgtattcggtctttgctgcggtgatatcttttggaatatccacaagaaccggtcccggtcttccggtctgtgcgatcttaaacgcacgacggatcgtgtctgccagtttgcggatgtcttttacgataaagttatgctttgtgatcggcattgtgattcccgcaatgtcaatctcctgaaaactgtcttttccaagcaatggaacattcacgttacaagtgattgctaccattgggacagaatccatgtatgcggttgcgattccggttacaaggtttgttgctcccggtccgctcgttgcaaaacagacacctacttttcccgtgcttcttgcataaccgtccgctgcatgggacgctccctgctcatgggaagttaaaatatgtctgatttccttctgatgtttgtataattcatcatatacatttaagatagcgccacccggatatccaaaaacagtgtcaacattctgctctttcagacattcgattacgatctgcgcacctgttaactgcatattgttgtcccctttcgttatttgtgtagtatcttatttctgtcccggaatctgcaggattgctccgcggtttccggaagttaccatggaagcgtaacgtgcaagataaccggttgtaacctttggttctcttggctgccattttactttacgggctgacagttcttcatcagatactgcaatgtttaacgtcatctccggaatgttgatctggatgatatctccctcttccacgagagcgatcggtccgccgactgctgcttccggtgatacatgaccaatggaagcgccacggcttgcgccggaaaaacgtccgtctgtgatcagtgctactgaagaacctaatcccattcctgcaattgcggaggttggatttagcatctctctcatgcctggaccaccttttggtccttcataacggatcacaacaacatcaccagctacgatcttaccgcctttgattgctgcgattgcgtcttcctcacagtcaaatactcttgccggtccctcgtgtaccatcatctcatccacaactgcggaacgttttacaacgccaccgtctggtgcaaggtttccttttaatactgcaagaccgcctgttttactatatgggttgtcaaccggacggataacctccggattcttattcactgcatttttaatattttctccgactgtttttccggtaacagtcatacagtctgtattaaggagtccgatatcagccagttccttcatcactgcatagacgccgccagcttcatttaaatcttccatataggttggacctgccggtgccagatgacaaaggttcggtgttttttcactgattggatttgcaaaagaaatatcaaaatcaaatccaacctcatgcgcgattgccggaagatgtaacatactgtttgtagaacatccaagtgccatatcaacagtcagtgcatttaaaattgcctcttttgtcataatatctcttggtcggatattcttattgtacatatccatgactgccattcctgcatgttttgcaagtttgatacgctctgaataaactgcagggatggttccgtttccgcctaatcccataccgagtgcttctgtcagacagttcatcgagtttgcggtgtacattcctgaacaggaaccgcaggttggacaaactttctcttcatactcttttacttcctcctccgtcatcgttcctgctgcgtaggaaccgactgcctcaaacatagaggaaaggcttctctttttgccgtgtacatgacctgcaagcattggtccaccggatacgaatacagttggaacattgattcttgctgctgccatcaaaagtcccggaacgtttttatcacagtttggaaccatgacaagtgcatcgaactgatgtgcgagtgccatacactcggtggaatctgcgatcagatctcttgtgacaagagaatatttcatcccgatatgtcccattgcaattccatcgcacactgcgatcgccgggaatacaaccggcacaccgcctgcctctgcaacgcctaatttcactgcatttacgattttatccagattcatatgacccggtacgatctcgttgtaggagcttacgatacctaccattggttttttcatttcttcttctgtaaagcccagtgcgttaaaaagacttctgtgtggagcctgctgcatccctgttcttacattatcactcttcatatcacgtgtttcctttctctaattaaatgcgctcgcagatcagatcacccatttttgcggtgccaacctgtgttacgccggctctttttgtttcttcctgcggcataatatcaatggtacgataaccatcttttaatacctgtttgactgctgcctcgatcgcatccgcctctttgtctaagtcaaacgtataacgaagcatcattgctgcacttaaaattgtagcaatcggatttgcaattccttttccggcgatatccggtgcagaaccgccgcttggttcatacagtccgaatttcgtatcgtttaaacttgcagaagataacattccaatggaaccagttaccatgcttgcttcatccgataaaatatctccaaacatattctctgtcagaatcacatcaaactgtttcggatctttcacaagctgcattgcacagttgtcaactaacatatgctcataggtaacttccggataatcctttgcgacttcttccaccacttttctccataaacgggaagaatctaaaacatttgctttatccacgcttgtaactttctttctgcgcttcatggcaatgtcaaatccacgttttgcgattctgcggatctcgttctcattataagtgagtgtatctgtagcggtcatcacaccatctacttcctctgtctttcttgcgccaaagtaaagaccgcctgtcagttcgcgcatgatcatcatgtcaaatccgtccccgataatatcgtcgcggagcgggcatgcttctttcagttcttcatataaataagcaggtcttaaattggcaaataaattcagggattttcttaatttcaaaagccctgcttccggtcttaattccggagccagtttgtaccatggagatgtctgtgtattacctccgatcgatcccattaaaactgcatctgatgcttttgcatccacaatcgcctcatctgtaaggggtactcctgttgcatcaatggaacatccacccattaaaatatcctcataggaaaatgaatgaccatatttttccccaattttatctaaagctttctttgcttccgctacgatctccggtccgattccatcgcctgagatcactccaatatgacactccatatccaattcctcttttcttccatttcacagtctgtcaatggctgactattaagctgtgccttttacactttagtacagtaatcactgacagtattattaagactataatatagtatctttggaaacatttcaaccacccatgctatttttctttttcataatagatataactcttaagtatatatacctatgtactgccattacttacatttataatggtatacattctgatataacttcgcgcgcactgtctcaaactcttccacagaaagtttctgcggtgctgacatgatacgcaacggaattgcctgacggtcttctcccattgccggctgcatatacgagttgtcattgaagcaaaatccattccgctcataaaatgcaattcttcgtttttttatggaatcttccggcagttccacttccaaaaccacttttcccggcttctgctccaaaagagtttttaacattctgccaccgattccgctgtttctcgcacactcctccactgcaaaatgctctatgaaaacaaaatctgaaaaatcccagactgcgaaaaaagcaagcagttttccgtcttttttcacgccaagaagtttatatttttcttccgaaagcagtttttgctgcccttcccggtttctacgctcgtctattggaaagctttgttccataatccgaaaaacatcttcaaagtcttccattcctaaattttcaagatgtatcattttatttttccttcctatttttctcaatatactaccagatctataagtttagcaattatctattttctgaatcatattttatcagatacagataagacgccggcaactgccgacgtcttaaataaagcactctattctcttgtgattcttatgcttcttccggtttttcaactgctgcaattgcagatttctgcattgggatacggcagttcttgttgcttccaaactcaacaatgactgtatcgtctgtgatgtcaataactgtgccgtagaagccacttgttgtcaaaacagtatctcctgttgcaagttccgataacattgcatttttcttctgagtctctttcttctgtggacggatcatgaagaaatacatgaatgcaaataaaataactaaccaaaggatcattccacccattcctgctgcggatgatgctcctgatgatgccaagattgataacatctttcttcctcctaaaaacttattgctctctaatatcgtattttgatatttttagaaactataaaacattgtacacaaaaccttgcgtttcggcaagcttttccaattaattttataaaatatttagtcttggaaaatatctgtccttttaatggtacttcttctgtccgctcatttctttttcgcggtcgatctgtcccatgttataaagtttttcttccttataagatctgaagtttccggcatcaagcgcatcccggatctcttccatcatcgtattgtagaaataaagattatgcagtacacacagacgcattccaagcatttcttttgctttcagcagatggcggatgtatgccctgctgtatctgcggcacgccgggcactggcagccttcctcgatcgggcgcatatctttttcgtatttctggttaaacagattgatttttccctgatttgtgtatacatgtccgtgacggccgttccgtgacggataaacacagtcaaagaaatccactccgcggtcaacgccttccaaaatgttggcaggagtaccaactcccattaagtaagtcggcttctttctcggcagatatggaactgtctcatctaagatatgatacatttcctcatgcgtctcgccaactgcaagaccgccaactgcatatccatcaagatcaagctctgaaattctctttgcatggtcaatacggatatccggatagattgctccctgattgataccaaaaagcatctgatttttatttaccgtgtcctccaaagaatttaagcggctcatttcctttttacagcgctctaaccagcgtgttgttctcgccacggaagcttccacatacgaacgttccgcaagagccggcgcacactcgtcaaaacccatggcgatcgttgagccgagattagactggatctgcatactctcctccggtcccataaatattttggcaccatcaatatgggaatggaaataaacgccctcttctttgatttttcttaatcctgcaagagagaacacctgaaatccgccggaatcagtaaggattggacggttccataccataaatttatgaagtcctcccatctctttgatcagcttatctcccgttctgacatgcagatgatacgtgtttgacaattccacctgacatttgatctgctctaaatcctcggtagaaacagctcctttgattgctgccactgtaccgacattcatgaataccggtgtctggatatctccatgcacggtgtggaacacacctcgttttgctctgccttcttcttttaataactcgtacaatttctgttactcctttttctctatctatttttagataattgcgaaactctaatttaggttgagagaattgtgaagaattaacaaaattttcgaagacacgttttcactatgtgtcgctcgcaacggtactgctcattcttcgcagtacttcgcaaattcattccaaatctgcttcgcagatggaatttgctcactcttgaatcatattctcacggtctgtgcagtaaatgcacagacctgattcaagcaagaaccggcggctccccaatgtcttctcaagcttttgtcaattctccacaatttaatctactttatttactagtttcacaattatctatcttctttaattgttcctgtgttatgtgttaactcgtctaggattttgaaataatcctcgaatgtttttttacagcacattggatctttgatcgtgattccctctgtccgtaagcccagtagggaaaatgccattgccatgcggtggtcttcatacgtctcgatcgcggctggatgcggaacccccggatagattgtaatagcatcctcttcctcctcgcaacggataccgatacgccgcagttctgtcacgattgcatgaatacggtccgactcctgcagtctgatatgcccgatatgtgaaatatgcaccggtgcatctgcataaggagccatcgctgccagtgtcatggtctgatcggaaaaatcattcatatcaatatcaattccgtgaatattgccatgtgccggtccttccacgcagattcccttttcggtgtccataaccttacatccaagtttttcgagcactgccagaaactttttgtcgccctgcgtattatccatatgcacatgagacacaacagcctttcctccggtaattgctgccgctccataaaaatagcacgctgcagacatgtccggttctactatatatgtagtctttttataagctgctcccggtaaaacctcataatttcttccgtcaaactgcgtctgcactccccagtcctccatcatgctacgtgtgattcggatataagagccatccgttttttcacttgtaatgtgaatgtgcagtccctgcggaatcattggtgagatcaataacattgcacttaaaaactgggtgcttttgctgatgtctaactctactgtgagtttatcatccacaccactgtctactgtcctctctgatctgcattttaatggttcatatccgcaattcttctcgctgccattcttctgcaagactgcaagacgacctgaaattttaacaggaaggaaaccttccttttccagataagtgattgttgcaccagccttttctaacaatacaaaaagatccttcatcggtctttttttcatctgctccgatgcattgatcgtataacagccatctgacattccgagcatcgcagtcagaaacctggctgctgttcctgcactgccaacatcaatctcggcttcttttttcgggatgctgcctttttctccttttactgtgacacgcttttgttcttcctccacgttcacttcaaatccaagcgcgatcaacgaacttaagaaatgtctggaatcatccgaaaaaagcacaccctctaatgtcactgtttccgatgacaatgccgccatcagaagtgccctgtttgtcatgctttttgaacccggcactgtcacgcaccagtcaatcggtttttctacttttttaacaagatattgttccattctggaaatctcctgaattgttatatattttcacaactttttatattttaccatattcttattgtcgcggaaagcgaaatcttttataattaagctatgtgaatttagataattgaaaaacacattgaaaacgttatgagttttcattgtctatatacgaatttgttttaaaaggagtcaaattatggctggatcaacatttggaaatatatttaaaattacaacctggggagaatcccatggaaagggcgtcggtgtcgttgtcgacggatgtcctgccggactttctctctgcgaagaagatattcagaaatttttaaaccgtaggaaacccggtcagtcaaagtttacaacaccacgcagggaagatgatgctgtagagattttatccggtgtctttgagggaaaaacaacaggcactcctatctcacttgttgtatacaataaaaaccagcactccaaagactacagtgaaatcgcttcctattaccgtcccggacacgcagactacacctttgacaggaagtacggattccgcgactaccgcggtggcggtcgttcttccggtcgtgaaaccatcgggcgtgtggcagccggagcgattgctgtcaaaattttaaatcagcttggcatccattttttaacctattcaaaatccattggaccaatcagcattaatgcgcggcatttcgatgcagacgagatcaacaataatcctctttatatgccggatgcagatgccgctgaaaacgcagccgcttatctggaagcctgtattgctgaacaaaattcttccggcggtgtcgttgaatgtgtcatcacaggtgttcctgccggtatcggcgatccggtttttgaaaaattgaacgccaaccttgccaaagccattatgtctatcggtgctgtgaaggggtttgaaatcggagatggttttgatgttgcaaaggcaaccggaaaaaataataacgatgctttccgcatggacgagaacggttctattataaaagaaacaaaccatgcaggaggtattcttggcggaatgagtgacggttctgacattctgctgcgtgccacgatcaagcctaccccttcgattgctgcattacagcagactgtcaacaaaaatggacaaaatattgacgtcagtatcaaaggacggcacgatccgattattgtaccacgcgctgttgttgttgtggaatcaatggctgccatcacgattgtggatgctatgtttgcaaatatgagtgctcgcatggattcgctggaacggttttacaaataaccggaggttaactagcgtagtgtcgcagattctgcagtgcttttataggttgtgaaggggcagatataagcgtcccctcacaagtcgtgattttatgggtttatgaaaaaaaaacggtataaacgaaatattatgtttctgttcgctgagcatttcgataagcctctaaagagtcttatctccatagctcacaaagaaaataatatttgtttataccgtttttctttcatttacattacgaatgacttgtgggagcgacagccactttaaattttttacaagttcaaatgtaaaaaatactattattgcacattcgcattatacaagtccataaaataagaatctgtacgcagtagttcttcaaaagttccttgtccaacaatcttcccttctctaaaaagaataattctgtcaaaaccggcaatggaatttaatctatgtgcaatcgcaatgactgttttatctttcattttctgcataactgatttcattacattttcttctgttaaattatccattgcagatgttgcttcatccaaaatgacaagttcggaatcttcaaaccacaatcgggctaatgcaagtctttgtttttctccacctgataaacaagtacctttctcaccaatttcagtattcaaaccttccgcaagattctcaactagatgagatagttgcacttcactcaatgcccccagcatttgttcttctgacacttttttctcaaataccaaattctcttttattgttccgtcaaaaacaggagcatcctgcgatagataactaactctatcatacaaattattaagacaaattccacttaactccatgtctcctaagcgaacttttccttgattgtattttagtaaccccaataatatcttaatcaaggtcgattttccggaaccactttctcctacaaaagctattttttctcctttttttatggacaaactcaaatcatcaataatttttcgttccccatattggaatgataagttttttattgctatttcgccaacatcagcatttattgcgttaccgtttcttaattgatcatcatcttttaagcctaaaaattcttcaaatctcttataagacgccttgtccaatttatattggacataaagtacattaaaaatagcaattggtgtataagcattttcaatcagtgcaattagtgcaactacggaacctactgtaaggttttgcgttttccatgcataaaaaagaataccaatatctaacattgccacaagtagcgcaaatattgtaaagaatgcttcatgaatcatattcatttttacctttgctgaaacaatactctctttggcattattagttttctttatttcattcggaaactgtttgctcatacgaaatatcaacatttccataaagcctctaaccaaataatgatttagtagctcttcactgttcaaaattttttcttttattttatataaaaactttagtagaatgttggttattataaaaataagcatatagcctacaaacaatgcataagtaacttttttatctattttccaaataaagtatacactaaaaacaatggtaggaagtaggtctcgaatcaaacacaaccagaaattgaataatacatttcttcctgctgtcgaaccattctcaatcctttgaacaagtttgcctgtacctattttctggtattctgtataatcaattgtacttatttttctaagagacaaaagcttaaaatccagataaataccatgtt

SEQ ID NO: 14297 - DNA, 37570 bp, Unknown
  gut microbiota DNA sequence
gtatttttgtgctattattatatgtatattaaaatatggagatgaaaactatggctcaaatacaaaaacaaaaagtgcagcttacaaccttgcttcgtgaaaaattacgtgatttgcgaaaaacatataataagaggggcgatgttttatctaaagaactggatagaggtgcatcatatatatcccagttagaaaacggaaaaattcgagatatagaatttgacctattagaaacattgtttcaacatattattggattatctggaaatgattacgaaagctatatagcgaaatatgtttataacattatcgcaaatgccccttctaaagattttttatataaagaagagtggattcatatttttgtaatgcagaaattccaatatgatataccagatcagcttgttcaaattatagacaaaaaattgttacagttaaattattcatccgaacaattagttgagaaaataaatcaaaatccttttcagcattattggtcagatagccaacgtgaggtaaataaattatacataaccattgatgataaagactatgataattattccatttatacggatattacttactctcttccaacggattatgttgcaaaaatactttcaaaaaccatgaccacaagtagctatatttatatggatggtattctcaagatattatattatatagaaaatgaggataagtctggatcaataaaaaaggcaaaaaaaatactttttgacaatagtttttttgatacaatagaaatttttgaaaatacacataaattgccgcatactcagcaaccattaaatatgcaagctactggcgatcaagatatttttactttttatgatgatgttatcgttaattacaatcaaaaatataatcagttaaaagaaaaggcattagaaaaattggactatgcttttgaccgctataaagaagaacacacctcttatgcgtgtgaagcattggaaaaaattattgataatatgaatgatgatctcggcttaataaccgccatgatttcatcccctattaattctttaccaaaagatttacgacaagatttttggaatgattataaagaattattgctaaaatatattcctaacaagtaaatctgactagtaaatttccacattaaatcgttctttcattttaggcatcaaaaagtacaatatatagtgtttcattatttctgaatatactatatattgtatatttattgataagcatatcaaaaacaggtaaaatctgcggagatatgcttatttttgtgcattagaaaaagccatagcgtgaactatgaccttttccgtttcaatcaatcaacatatttagaaagttttcctaaatacccatatattatacagtcaatttaacttattttccataggtaaatttcagaagttataccgcagctttgatatatgtatcatctgctactttctcacagacatagtcatcatctttaccgaagaataactcattgcagcactctggactattatgattccaaactctaatagttccatctgcatcctgtataatccaactatcagatgcaagaacataaaaatcatacatatatgtttcatcagaaagtagcgcatattctccaaagtcccagtcactatttttcttctctggatcagtttctttcctatgtaatactggtactggcgcatcataatcaacttcaatctcgacagctacaccattcaccttaatgtactgcttattgtctacattgatataatcccatgcttcctgttctgtatcaaagaacttcataccttcatgccagcgtttttcaatctctttcataaatttattactcatatataccatccatccagtttccataccaggctgatactttgttgctctgactggctttgtctgatatacttttgcattctccttaaaaatatcattcaatataaaattatttgtgtccatagcctaaaattcctttcttctgaaaatgtagccttgtgcagcaatgtaaaaagcatcctttattttttccaactgctccgatgtgaatttatcttttaaactctctttgtagtcattccaggcttcatcctttactctgttgctttcaataatatcttccattgttatagtcatgcttcattacctcttcacttatataatgcacattttagattgtgtttcccctttttgtggtaaatttattttctcattttttcctcgatgatacttttacctattatgaaaaaccaatatattgctaatggtatgaaaatcaaaaggattttcattgttacattttccacaatcatagatgcaattaaaccacactcccatacaaccatgcttatatagaatccgtatgtaaaaaatttcaattttctcttcattctaatacctctcgttcttcctcattttctctagcttttccttcttctgatttttatatcttacccttgttcttggtttgtatttattgcagtgctggcagtaatgagcgtgatccgcttttctgcctttagtacataatcctgcacatacataatataagcatggtgtctgtctatctgttgccattagttgtgacctccttgttaagttcgttgcatctggtttgtgcttcttcctgtgtggggaatagcttctgatctgtatagtcgctcctatcagcaaatccatatttcacaactgttttcggttcgttgtggtgtccaccagtgttaagcagataattatataccttgatattagtaatgatgtttttaccagctaattgatatatttttctctttccatgtaatcgaccagtgccaaaacatttatcacatgagaatctattaccatctatgataatatctccatgtccgttacaagctgcacatggttcttttgctcttgctttctgaataacatatacttcttgtccaatatcgaattttgtttccatgttaatcttcattggttgttacctctctttcttgtatggtttttgttgtaacaatacttattacatctaaaaatcattttccatatacgataagccatttttcggcttaattccttgtttattccctatatagtagggtttttcaatgtcgtaagttaattcacttattagtgtatacattttcaatattacctactgcataggaatgattttcgatttcatttagttcctactatataggtaggttatcgcaattactaatcatttttgcttagtaaattaagtattttctttgtactcgatatagtgtacgataacgtttttattcgtcttttcccatttctgcattgtattcagattcaatatcatccataatgtcatgcagattttcaatttctccctttaaccagtacagatgatcgtttgcaagaatcggctttcctaactgatactgtcgctcaatcttatccatcatatactgaataccagcttgaaaacctacattaaaaatctgctgtctatcttctgttttctgctcctgtgatctattcatcttctccgcttccttttcctttgcttcctttaataactctaataatgtcttatccattctcttacctccgttttatgtgtaaattattagcaatactgcaatgatacttcctatgattatttgcagtacagtttcctttgttatagttttaggctctctgttcattcaatagctccttcctttagccccttacatatatctaatacacattttgtaactgatttcccccacttgtgcggaaaaaatttataataattcgcttttctttttgatttgttccagattcgggttcaagtattttaatgtggtcttgatactggtatgtcctgcttgatttgatacctcatttatgctatacgctccactctccaatgcgttataacagaagaaatgtcttagcatatgtggatggatatggtagccatcaatactaaattcatcaaatactttattgatagtagacggattcaaaatcttccctttgctgttatggaataaataatctgattccacattatctgatctctggtattcccttattgccgagataaccttagaattgataataacagttctttgtttttcgccttttccgtctgctactctaatctgactcgcagcagtgtttacatctacctttttcaaatgcaatacttctgatattcttaatcctgcataagccataatggtgactattgcataattccgttttgcggaacatccttcagattgcaacactctttgcctaaactcttcaacttcctttttcgtgatattggtaggactgattatttccgcttgtacatttatcaagtctgctttgcttattacaatgttatctggttgcatcagctcattatatttaatcaatccagatagcataacatttatagattttgcgtttagattctgccccgtcctcttgctagtccttacatttttaagataacttttgtattccagaatattttccctatacagtttcttaaagccaacttctccgaaactatcattgaaccatctgaaaaatacatttactgaggttacatatgattttattgtcgtatcggattttccctctaatcgcaacttgttttcaaactctcttatcagttcatccatcaactacacctccaaaaaataatattgaattagaatcatgcaagtttttaaaaataatattgaaaatcttatatgcccttctacttactaatacatattttttcagtaatattccccttatattgaaaaaataattgaggtcatttttgccttattccttgtatatatcctgttcttaccttatactatatatggaaggagttgatttatatttacattgagatacagaagccgaaccgcttcaaagacctgttacacaagattcattctaaactggaagatatgttattttccattctacagcacacaccagacagattcatcccaaaatcccttatgagttggtttgagaaatataccaacaaacgacttgcacaactgaaaagtgacgtgatccgtaaacgctggcaaacaatagaattagaaaaggctgttgataatatccacaatcggcagcagagttaaaaataagaggtttctcttctatatgatatagtagatttacctcttttttatttgaacatctgttctctttatgctatactgttattgtgtaattgaaaagaaagtaggatgtgattttccgattattagatgccctctagtttacaaaggagggtgatgccctatgaacacgcttgaagtcttaactcttgtgctagtaatttttgcggctctatcttacatagataatcataacgataaaaagaaatagcatcccaaccgaccaaagttagatgctatttcaaatttagtattcaactgagggcaaaatcggatattgcatccgattcgctttctaagtagattatacaatggggtgcttgagaaatcaagtaccctttttaattgtcctgtgattctgcttgcttctttgcgttccttgcctttgttgcttctgacttcttctgtgcagcctttttctcttcctctgtcatatttcgttttgattttcctttttcatcttctggataatcaattacatattctgttccgtctgccttatcttttaaaatcaaattcatttccagagcatccgcaatttccaccaattcaagggaagaaaatttgtctctactcattttgttgcttaaattctgcctagtgacatttatttcctctgcaagctctatctgagattttccctttgcttctaatatatccttaattactgtcgttgctgacatatcaaccaaacctttcattctatgttcacctccaattatacttgatttcccctattttttcaaggtcagcaaaattcacttgatgcacgattgcaacaatctatgtacaattttccattttaacttatgctttgtgttcttttccgtctggtacataaaaatatcattgattcgatttagaaaattttcaggcaagatatttcccttgaatacattacatggcaagcaagtacaagcaaggttagaaacatcattttcaccgcccattgataaatggttttacatgatctatagtcatatcatccagtaaaattttctttccacataattcacattttccatccgcttttatgtaaagcaatttcttaacatctggtgaatatgttttccgcttaatctttccagatttagttcttttaattttttttcttgccctcaattcctccaattcttcctctgtcattatgcgccagcattttctttgcgttttcaaattatacacataataatccttcaaaacgtttgatgctgcctgtaatatttcttttgctaaatcaatcgtttcaaatttatatgattcttctatatcttttgttatttgtgctctatgaagatattttatataatactcaccatttgtaatcacataactcataataatttccatccttttcattaaggacagccatatttcagactgtcctttcatcctttacagttcccttttatctttcttccgggaaacaaactgttgtcgcattgtctcctggtgtttcggagattcgatttgtaataatccaaattctatcttttgaggtattgtaagcacccataacatataaatcatctggataattcaaagcatcctcatttgtctgtttatcttctgcgtccatatctccccagtctttaactgcaaatctctgtaatgcaactgtgacctcaaccgcaaatttctgttccgctgccataaggtcattgattgatcttgtggttactacctgtcccatattgaaaaattttgatgtaatcatttcattttacctctctttctcttatatcaaaccaaccatacaagccattttatataatggattctttgcaagtttccgcatatgctccgctttctgtttggctttgcgttccatcctgtccatgattagaagcctattatccatttccgtatattccaccatctgcacaggagtaagtgcactatatggtgttttgagtgtacggtctataatctgatttccgtctgcggtatcaataattctaaaattaaacatttcgctttccgtccttcctatgcttccattacttctgtaacaattctctttaccttttcaaactgcttatatactcgtttgtggttgattctgtgattttctgctatttcctttagtgaatagccttgtactttatcagaaaatattttcctttgttcctctgtcaatccgttttcaatctgctttaccatttccatatattccatattagaggctgtttccattgtggaatgattagaaatattcatatccattgaatctaaactaatatctgatccggcttctgtacttctcttttgtgctttttgttttctaaagtgaacaaatatcgcctgtttcatatacatataggaaaccgcttcaaaactgcatttcgcttgtaattgcagatcattcaaatacttttctactgataacaggaaatcaaacacaacaatatcaaaaaattcttctgcatccagttttgacttcttcataaactccatgattagatggtaattctcttctgaaaacttgcgttcttcccttgtcaatggtcttaattgctctttgttttccatgtgataaccttctttctattggtggcaagcgtgccatttctgacacaccgcccaacccatatttacatatcaagcaaatctctccatttgtggtattcatcaatgtttccaaaatactttgtatcattgaataatcttgccatagcacaatttcctgttcttctaagtgttaaaagtctaataagctcttttatctctgcaagtgtccactctctatactcgtctagttcaagccttgcctgtcttgcaatctctgtatctgtataaccctgtattctcatagcaagaacaatttcaagaagttcaggctctgcatatctgccaacatttgcaaacaagtcacgcaaaaactctttttcaattacatatgcttcaacattttttgttttatcaatccaatatgcatctagtggatgtcccgaaaaaggattatcaccctctaattcataatcaagactaacaaaaccgccctttggcatacgcttttgtgtgtgatctgctctatgcttgccataaactgcacgagaaagaactttttcagcaaccgcgtgaaacggataaatatgtaattcctctctgctgcaatacttctttactgcattaagataagggataactaattcgtcataccattcttctgctggcaaatgattccatctcataaactgatataaatagtcgtgatgttcttctgcaaatactctttcctctgctgttaaaggtctgtcggtatagtccgctttctgtcctcttctccatgttcttttttcttccataattagtacctcctaaaatatgtattttgattgattgattttgtacggctgctattgagccgataggcaagttgtaattgaataccacggcttcaccgcttgcctcgttggtatcgggtggattgctccacccttgccaactgctgattgcttgttattagtcgattcttaatactgggtaagaacttactttacttacttttgcataatcatcttcactaagtaatttttttacttcctctttgttgactgtttcacgctcatgctttgaaagtgtagccttgaaaacattaccgataaatctacgaataggtttaccctttttgtctaccgtttcacattcttctgtttcgttgaggaactccataacctttgaatttaaagctgtaatattgtcctctgcttcttctttgattcttttccactcctgaatctgctccattgcttcattcatttctttagctgtcatacacataatgactacctccttaaatatgtttgattgattttgtgtaggtctgttttgtttgaccttgtaactgtattgtacactcgttagtgtgcaaaatctattgacgaaatatacaaaatgtacacttgttagtgtcgtttttattgtacaagttcactacttagtgtacatattgtacaagattatcgtacactctttagtgaatttgcatattgacattgtacacttattagtgtattataatggtatcaaatcaatcaacaatatatttttaaaggaggtttttctatatgaaatattttaagaatgtagaaacactggaagaattaagaaaacagtacaaagagctattaaagaagtatcatccagacaacccaaacggatctacagaagcaacgcaagaagtcaatgccgaatatgatacattattcaaaacattaaaagacagacacgaacacaagacagagcaagcaagcgacaccgacaacaaaacagattataataatatgaaatatgatttttcagaagatgaaaagttaagggaagtattacagcatattgttacaatggaaaatatcaatattgaaattgtaggttgttggatctgggtagatggtaacacatacaaacacaaaaacagcttaaaggctctagggtttaaatgggctagggaaaagaaaaaatggtattttcatacagaagcattcagaaagagaagcaagaaaaagttatctatggatgatataagaagttattatggtagtacagaagtacagacagaagcaacaaagagattaaaagaagcgtaaaaaaataagggtgtaggacttacaagcctgcacccgatacatagaaaagaggttgtatattatggcatatatcagaaaaacaatagatgaatatagattactttgtaattatggttatggttgggaatgtattctaacagaagaaacaaagaaagaaatagcagaccgcaaaagggaatatatagaaaatgctccgcaatatccgtatagagtagttaagaaaagagttagaaagtccatacaataaacataataccgatagaaatattaaagggtgtaaccaatgaagttacaccctattttttatatgctctattgatattttttattgttattatatcctactgttttagtggggattgtgtagtccagggtatcaaaaactaaaaaagggaattgtttttctccacagccctgtagttggttcttccatacagcgacttgaaaattttaccctacgatattttcaatactaaagggaaaatccccctaagtgaaactgttccacttagaatataaaatcaaggtttaccaaatttggtaaaggttgaagcttgttgtaaatttgccataagctttgttcggatgtccaaaaatttgacatctccccagaaatggtgacatcttcaaaagaggtatctataatggacacaccttgaataattgttcctgtgaaggagttaagcattgttcaaatttgactaacccttccaatcggactaatcaaggacagtttcccacacagagaacaccctatatccttagcacaaatcaatcaaaatcaactcaaatccgcttcaaaacacatcataggtaaacttgatagcctataaatatacaaagcaaaactgacctcaaaatcattgatttaagcaagcatatataccatagggggtactcttaaacctgtagaatttaagtacctgttatatatcagtataggtatattattgattcataaattgttcaagtacagctctgattctcggatcattaccaagtgcattgtctggtaactttttctccacaactctttttgacactttattttgtttcttcggcttagatttaactgatttttgatttactttattctgatttttctttactgattttctggatgctttagcaagtttttcattatatctcgcatctgaaataaaatcagcacactttgtatatccgatacaatctttattacattgtgtagactttggattagtacatttccaatattccttgtaatgacatactttcttttcttgtttacaatatgccaatgcttcataatgtatttctatgtatgctgatacgccctgcatctgttgtacacttgctttcatatgccaccagccttcctatgcatactcttctatgtaaggtgaagactatgcaatgccatatctacatatatcttagtttatttttttattgtcatatgcttctacaaaatcaacataataaggattttcccatttatccccattactcgtttcgacagatacgacaatagcttttattgttttaatatttaaggattcttctatctcatatccgctatctttaccatacgttttatctggttcaagatttattccgctatatgatacttcttttgtgtatgaaccatctgttatatcaactgttccctttattcttactggatatccattagcatcccatccaacaaatgcaacaatagcattttttatggtcttatcagaattattttttataacagcttctatcatatctcctgtagctaaatataaatcttcttctctctctatttttgttgaatctatataataatcttgagaccgcaattgactatcaagcttatctcctgttaaaagttcttctccattattttccttttccattctagcattttctaaatcacgttttgttttccattcatttgctgagaaaaaggaaacatctgtagtgctatattcaccagtatcatcttcagaaactattatattaaatccatttcccaccatagctccatagctattttcgccttcacaatatcctgttacataaaatttcccagactctaattcttttattataaattcttcatcatcgcaaaatgtagcagtatctggtttcttcaagctatttgcaacttcacttttaacataatttagaatagcttcgttattatcactacttccacatccaacaaaagatataaccataacctgtattaaaatgaataataaaaattttttcattcctacttcctccgttttgttctcttttataagccatcagtatttgcattaaatgcataatttacatcattatacttaataattattgctggatcataattttcagaaatcattccaagcattatatctgaattatctgttgtccatctagttctatatgccacataaccgtattctaaggctttactctctcctgccatatcgactaaatcttgatcttctaatggtaaaatttcatcctcacatggtgttccatatttctccgtcaatgatttctttaatatattatactgtgaaatatactgcgatccaacagtatatgtattcataaaactgtatccggcagaatgtattttctcatcatctccgactgcaaaaaatgtgtatgcatcatatccagccacttttctctcatacgcatatatattatctgacaaatcataatcgtctccctcatactgtataagtgtgtctatatcatctccccatattatatccctaaaatctgtattttttcgttgtgtaccagcctctcttgtcttctccgttttcgcttcttctttttccttttcctgctgtttttcagatgtgttttcttttgtatcctttggttcattattagtaatttcttgttttcccccacatgcagccaagaaaacagctaatgcaataaataccattattgccatcttttttattctcataactcattacttctccttcgtttgtaatttattaccattatattcgtttctgcgaagatattcaagtataagaatacaaagtacacttgtttcatatactacgaaacggaggtgctatgatgattgactattccccattctggaatacacttgaaaaatcaagtgaaaactggtacacacttacaaataaatatcatatgtcacatagcacactccacagattaaaacacaacaaagatgtatctaccaagacacttaatgatctgtgtcgaattcttgattgtgatatttgcgatattgtcagatatattccgtctgatacagaccaatcattataaacaaaacggtaaaaaaataagcatatcggatataatatccgatatgcttataaccaaaactattagtaaccattaagcaacaaatttttattatgttcttctaattgatacataattattgcatacataaaataatcaaaagaatgatttccaatatcccttttagccaaatcaagaataatacaattttcgaaggattctttcactttactattacttgatatatgcgtttcatataagtttaatttacctttctgttctaacaattcaaacaaatccttattctctttataagactcaaactgcatagcatgaaacataaacactacactactataaaacgctaacctaaaattaattaatgcatttttaacaacccaatccgtattatacgaatctatatttctatctatatattccctacaaagtttttcatcaaaatcataaactttatattctataagtgtcctacataatattgcactaatcttatgaaaatccattcgatgttccgtttcagaatcacctctatgatattctccataaaaagctctttttacttcttctcttttttgctggtaatatctttctgcattattacatatttgttccaaatcacgaatctgaacattgcaatattttctaaattcttcatcagtttgagcatacaaatcatttatcaatgggacaatccactctgtccatatatatctaaaattactcacttcttccatatactgcatctctcattcaacattatatttacttagattttcattatttttatgaaattcaatcatctctgtaagttttggtgcagtattatctggttcaaatttatttaaaatatatctgcttgaacgcacagcactactagttctttttaatgtgaaatacattaccacaatcataaatataattaatattgccaagaaacatattgcttcaaaaattccattcatgtttcattctccttttcgtcacaaattatgttaaactatgatttctatgcttatatttttctttatagcacattagatttagccaaagtaatgtagcagtaagcaccaactctataactatccatagtgttgaaatccctgtcatcacatacatacaaaatattattgcataaatcattacaaatatgcatgtaaaaatattataaacataatcattagctttatctcttaacaactctgaaatgtttaccaatacacaacccagcacatatgttatagtagtaggaattagtgaatctaggagtgctttcataaaattgctatcttcacttaatgccatgtactgtacaattatcaaactaattcctaaaacatatgtaattattatggtcagtaaaaaacctaaatgttcttttataaattccatctttatttatctcattatccattatcgtaaaatatcaaaaaaatgccttgtataacacaagacaacctaacaacgctgcctccacaggacttacggatatacaactcatccacctgtttcttaggctatctcatttaataatgcttacaattgtatcatcttaatacatactatgcaagcacttctttaggatttcctaaatagcttgtccatattataacatatttttcgacattttccaccattttctttagaatccaacaattttgttatccaaaaatgcaatatattgtagacggtatcaattcaaacacatcattttgtcattcatgcataataaagcatactatcaacatgtctaaaaatccattaatctgtaatctcaatctgccaattcatcatagcttgatatatcttgtctgatatcttgtccttatgctgttctgctatatccttaataaaatcttccttatattccttgtatcttgagaaggctgcttctactgtctcatatgctcccagctttatattctttccttcaaatgacatatttgcaacatatttcttcttatccttgtcaaaatatacacccaaaggataatcgcctcggttcttttttccattagtgaataatgaatttatcatcttagggacaaagcagactgtctcaggactataaactgtatttcctttaatcaaaatatccttatctaactcaaatgcttcatcaaacattctcacatctgaaatgtgctgttcataccatagcttaaaattactgtaattcttccattcctcacatacagtacaattcttatattctggctgtaattcatgtattgcattactgtagcaacgattcattatccaatgccatctcttataggattcctcattgctgttggtatataatattccatgataccctacaccatacataacacgctttgcggtctgtttgctccaattatcaggcttatatcgaatatcattcataacatttaatataaactgctccgaatcatcacctgttttctggaagtgattcttcacaatgcggaactgttcttgattcaatggatataaatttctgtaatagcaatcttccttatcatgtccactatgccaaatatatacattattcgccttatcttcattgacaataaatgtttcaacaaccattttcggtgcatatacataatcacgcttgtatgtccacttaccatcaataaatacattctttttaaggctatatctcaattcaccattgatatatgatccttgtagcagattatattttccccaagccatagaaatacactgaccatagtttgacatccatgtatccttataatccatcagctttacaaatatttcatctgttcccataagaacaacatcaatatccaatgcagatatatcaagtattctcttaggatttatctctttgtactgacgatcaactaatatttccaagttatcagagaatgaaaattccttctcattctttttcttcttgtattccttgtcatacttagcttcacattctttacaacttcctctataatatggattgccaaactgtcctgttgctaatctaaagttctgtatcggtaatattctaccgcatttcttacatatttttgtttcatccattgtcctttttctccttattctttacataaaaataagaccgtagaatcaaatcatactgtcttttcagtcaatcaatatcgaatgtgggataaaaggggtgggtagtaacatatatatcttagttacaaccctaccctcttacctctctctatatctcatcttcaattattatgttgggataaccatctgatttaatgtcaaattgctcttttagtaccttattagccttgactttctttaatccatagcaatccataatctcattcaaacaccgcttaatctgtgtctctgtaacctcgtatcggtattcattcccaagaatatatacaacctctttttcagtacaatatccttttctttgaatgcaatgcaaaatcacttctgaaatcttcaatgtacgttcatcactagcttttgtggtagtcctgtttacaatctcaccatattcatttttctttttcttatactggggatataatgaggcggctacctcaaaaccttcagaacgatagaacatatcaaacgatacaccaccaattctatagcctttatctttccaacgggttccgttatcttctattgttttcaactgttgcactacccatgatgggatagcatagaaattgacacgattcttattaccattcgtgtattttaatgcgtttttcaataattcctttggtatctggtcattatctaatatccgtattaaatcgtgatagataagcattttcacatatttattgatcttgtcaatcttcttctggctattaccttttcccatgtattcagccaactttttattggtaacgtaaaagattatttctccatcgtcattagaaaacttctcgctataaatattgtttcgtgcaatagatagcatcataagaaatgtgtcctttgcatatttgatatttttatcagcctgtggacatagttcttgaaatttgttcagagtgatgttatttatcatcatatctatgttttctcgctgttcaatgctccattgagattcctttatagacagattataaatatccattatgaattgaatagctttatattcagatttgaaatctcccaacatttcaatcaactgttttatgttaagagtaagattttcagaacaacacctatacttctgtactccattttttgtagtaaagatgttggcagaagggttatgatcttcatgcagaatacagcaaaaagaccttggatcgtcaatatctatcagctctgcaatatccagttccgaatagatataatcccaaaattcattttttgtatcaaacttaatcggttcatgtgctaatactgtacgcaaataatcaacatcatgttccttgattgctttgacatttaagttttcgtatgagtgatattctttgtctgtatcactcttttcttttgttttcttactggcagaaggcttctttttggatttaggctgtgcatttgatatatactgctcatattcatctttccagtatttttcaataactgcatcagcattgattctgctgttatatgatggacataatacctctccacctttaccaccgaaaaacaatctgtctctattgaaacatacttcatcaattccacctacagcacccataagagtagcttgtaatctgtctctgacatttccatctgtaataacagtatcattacagaaaatcatacggaatttatgatgttcttctttgtgtgaaaatgttgtgtacataaagcaaggtacaattccaagagaaatgaccttgttatatgcttcatcaatacacatttcattatcaaaatctaaaccaaataactgttgctgtacccagttatcagctttcataccgccttgtaatactcccggcttaaatgatgctccatcacataaagcatctgccaaatcttctattgcaatttctgtctcaattaaacttttctgcacccatccacattgttttccttgtggtttctcattgaatcgtttattgaaatacatacatttaatcttattgtcactaatcattttcctcctttttgataaatcagaggtcaagaaataaaggtaaactaaaattcgttccccttaataaactactaaatgcagcagtcgtgttattcaatttctcatattggaaaatgtgcagaattgcacgttagatattcttgatctctgatacaggctttcttttacttcctgcctattgggaaatatccatcatattttttgaatcggtgtatgtctgccgattattcgattgtaaacataattactctttctggctgtgtaaactttccatatatactttgcttttcaataatatatgaacgattgccatagttatatctatctggatataattcagtagccatatctccaagtaatacagatattctatccaattcacttgtatctgtaagtgttactaatatagaaaccctatagctttttcttatttcttttttgctatttccataaataggatattcattttcatctacctcaactgatatataatttgcaatatctgatacataatggtcaaatatataattatcctttataaaactatcaccatattcccttagacattttccttcatcttttgaatactcacattttctaaaaacctctcctaaaaatgttagaaaaatatttaaaactgtaatcagagaattgggaattggtgaattagtcaaaattgtgtaatttacagtatgtattaaatgaatcaagaaatctttctctagtttcattatccatatttttacatgtcgtttccaaaatatcatcgcttatatctacttttgattcaattaattgtggaaagctatcattaccggcaataagaatgaatgtatttgattgttcaagtattttattgtttattgttttgaatatcatactatgttctccttctttgatgataacttagccaacgagtttttaatcttttttcttgtcttattcatatcaagactgccaaataatccgactttcaaacctccaatactttcagttttcttttctcccagattattcaaatccttgctaatgttctcttttgtagcctttacatcaatatttctcattactttttcgtttaattttgtcataatcttaattctcctttactttctttggacaccatataggactaacttctggtggactatacgcaccaagcaatccatatatctgtgtctgttcgttttctttgcaacaataataatcatcaaataaatattccatacttttacagcgttcacatttactgcaatctggtattttatccatgctttgcgtccttattttgttatcaattcatattcaatgttacacgtatcatcttctgatacatcattattctgttgtaaatgcagtccaaataacgtgaccatgcaccctatatcattattgtgcttatctgataactcaaaataagcgtccttgatatgtaatactttcgccattattcatcctatttttctgtattctgttttctaatgctatctctaagattgttactcggtgtaatcttcacaacttgatatgcttcatgctgatacactttatcacgcacaatatcatatctatttctagttggtattgttactggctcaatcttcaaaagattattcaaaagaatggcattatcattgtccatttcctcatataccaattcatttaaagcaacaagcattgctttaatatcctttttgtataagcctgtcttttcagatagcttgtctattacatcttttttatatagaatcattcagtttcccctcccttcctgttttatatgtaaactaatgttctcactacctctttcaagtaatatatggtaaaatattattacctaatttttgaaggagggatattatatgtctgatacaaagtttaattcagaacttgcagctcataacgttgctacaattctcactcaatcatgcatcggtgaaattgacaaagagcaaatcccaattagtgctagtcatcctacatccgatttctttgaaaaatactctaaacagtatgcatactattataagggattttacaaagaagcattgcgtcattttaatggtgatttgagtgattactaaaataagagggcaattagccctctttattatatttctccactgtttttagtggttctctcaatattaactttttatcattttcaattagaccagacagagactttacaatctcgtcagattcgacaattgaaaaatctcgttctttcattaatgaatagatttcgtaaacaaaattatcaactttgataggattatttactccatcacgtttcatattgttatgtctaatattttcccatatttcattatttgtcatagtcttatttctccttccttatactctgactgtgaatccttgacttctcaaataagcaactgcatctcttaccaatgctccattatctacagtatttgctattgtttcatcccatacatgaggtgtattaggtgctaaattctttccaccatgcagaccttcattcgcccatgttgcgacctgttgaccagttacaccatagtaattgctcatataatctatatcaatatacaccgatgctaccgctttacctctgacaattcttgcggcaactttaaatcctgaccttagaaagtcatattgtctacggtaaaatactggatcgtatgaatcataatatttctgtagaaagaagtttaaagtttcatatactcgttgtgccatgccatctaccattttctttaatgtcggttgtaatgcaatagccaagtcatccatattatttattacctttgccatgctgtctgttcctttctggtgcatcaatgacagatatatccgctgcgttataatcgcttctgtcacttacaaatggtctaaagaatacataatatcctctttcaatgtattcaccatttaaattagaattatgaataaaatatgatttgccatcttctccacggataaatccataacctttgtctctaaaatactttgttactgttccaaacattcaaatcctccttgtaaattttccaatgaaatgcatatttcttatttaggtcatataaaggctctgtgacgctctctgtggctcatataagcactttatgaccattagtgggtatttgtgtgtctttcgattttaaggcactaaaataagcacttatcaatcatatttctacaactgataagtgcttatttagatgtcctaatgttctattcgatttttattttggtatgcatttaaggcattgtaattagtaaataattagtataatcagaagattttttcaccatgcaccttataatgctatattttcagtaggtttgagaagataatcgctatcatagtcgataatcgcgatcattctgtcacctctgataaacctgccttctctaatactttgtaaatttccctggaataagtttctttatcggacagtgcatacatggctcttgcatcctctgctgtcaatccaaaatcctgctgtaatgctgtctctgctgcacttgcaatcttatcaaactcgcccctgcatccataagtctctgcatcctgcagatacctgtcataccgttgcaccgtgcggatcaaagaatccagagccatatcgtaaacttttgcattcatcatgctctcatacgcttcatattctgcgtataccatagcagtgatacggtatttctcataggtatccgtgtctttttcttttactttctctcctgcaactgcctggaatgcatccgaatatcttccttctgcaaatgcctgatctgcgtcagaaaaactgttcgaatatccgactaaatgtgtacctgccagcacaagaacaagaatggatgctgccattacaaaaacaaggatcactggcacttttggcagtggtggtgtattgtccggttcagccggtggcttcggtttcttttcctttttcggttttaccttcttctccttcggctgctttggagctttttccttcttctttttctcttttttcttcttttctttcttctcttttttgccgtcagaagaaccttctaactcctttaaaatgtccatatcttccatagacatctctgtgatcacaggctctgcctgcgcagcggaagcttcctcatcctctaattcatcatcaccaaacagtaattttgccagttttgcaaaaaatccttttttctttggcttttcttcttcctctttggtttcctctgaagtttgtggctctgccgaggcagcagcggtttcctcactgctttccgtttcttcccctgtgccgcttaaaatcttcatcagctcatcatcttcatctggtaatgtctctgttttctcagcctcgctgtctgtttctgcatcgtctaagccaaaatcactgaatccaaaatcgtcaatagaaagatcatccgcctcgttttctccgtcagcttctgcatttgagtttacgctatccatgatctggtcaatgtcatctaacatcggctgtgcagcttttgtcactccctgagaggtttcttctttgttcaattcctgttcaaactgttttaaaaattcatctgaatcattatcacttctaagttcctgctcaaactgatccataaaaagatcgtcatccacaggaatatcaattttctctgttgtgctcttttgtggcatatcttctctactctcaatttcttctgtatttacaggatcactgtcattcaaatcagacctgccgtctacggcattcaataactgatccagataattttctgattcattcatctaaaattctcctgctgtcttcgtcactttgtatttatagtaaataatagaatgtgcgctttctctgcggacattctattattatgaattagggatgtgatgaaacatcacacccctttgtatgacttaatctacgctcttatcgatcagattgtcaattgcctctaccagcataccgatctccggctttgtcaactgggcatctgctcctaactgttctccctttctgcgcatctcctcatttactaaagatgagaaaataatgagtgggattttcttaatctcatcatctgacttgcagagttttgtcaatctgtgtccgtccatgagaggcatctcgatatcagtaatgatacaatgaacatcctgtcgcactgtaccgttcttctttaattctgtcagcttatcccatgcttcctgaccgttcattgtcatcatcagattcgtgtatcctgattttttcagacactctgagatcattttcccaagcagtggggaatcctctgcaatgaggattggagaatcgcttctgtctcttgacggtctgtcttccacatctgatactttcagtcctgtctccgggctgatatctgttacgatcttctcgaaatcaaggattacgaccagcttgccctctaacttaataacaccggttgctgcactcttttcttctgtattgatcgtagaatccggtttgataatctcctcccaggaaactctgtggataccaattacctcatctacatgaaaagcaatgtttaatttattgaagtttgtgataataaataaacctttcttctcagacggttccatgccaagacattttttcagatcaatgactgtcatcatagtatcacgcggcatgaagattccttccacacaaggatgtgcatttggaattggcgttacctgctgataggtaaggatctctttgatctttgctacgttaattccgtaatagttgtcccctaacgtaaattccaaaacctctaactcatttgtacctgactctaaaagaatatttgtatccattgtgtcttcctcccgcatatatgttctcttacgtttttatttcttaaatgctcactttcgcctttgcgtacattatatcatgaacttgcagttcatgatcgtgatctacactcgctgcgctcggcagtcttattatatcataactataccatattttacaattttatttcataagttgtgttatctcttgtcacatgcagtacaagatcagaaacttctgtcacagaatccggtatttcgaataaaagtaccgctgtttttgtctcatctgctgcgatcacatcatcataagtggaaaaatcggttgtcataatcgttgtataagctgaaacctgtgtgctctctgcgccgtctgcagaataatctgctgcgaatttcacctttgtagtcagattatccagtgtgaggtcttcctctgtcggatttgtgatatcaaaagtcaaaaccatgaactgttttccaccggaagctctcacatcgagcacatcgctctctgtgtaatttgctgcaaggctcactccggtaaatccaacctctaatccttctgctccaaacacatcctctaatgtgcttccagccggtatctcatctgctgcatctgccgcctcggtactctcactgcctgcagccgtctgctctgtctccggttcttcaggaacgctctggtctacatacaccagtccgtccttctgataggcattgtattttgaaacaacatgtgccgcataattgacgatctggctctcctcgctatctgtgagttcatatgcctgtgttccacatcctgtcagcagaagcaaacctgtcagacacaagattccttccactctttttctctttttcatactatactattcctccgcctgtgcaggatcaaatcctgttttctccgtgtcaagttcaaaccagaactctacgccgtcctcatggtttatcacaccacattccctgtggaacgattccatgatcgcttttacaatggaaagcccgataccgctgccaccatattccctggttctcgctttatccactttataaaacttaatccacacattatcaagatcttcctccgggatttgttttccggtattaaatacacttacccggacaaccttgtctttccttgtataccagattctgatctgcttatcaaattctgcatggtggatcgcattgctcagataattcgtcacaacctcttccaccttgaactcgtctccccatgcgtccatcggctcattttcctcaaacgtcacggtaattccattctgctctaaaagaatggaagacgaattcacgattccatgaatgagttctgtcaggtcaaagcgttccatcggaaccacttcattgccaaattccaactgatttaacgtcaaaagcttcttcaccatctgattcattttatctgcttcatccataatgacttcacagtaaaaatcccggctctccgcatcatcattgatacattcctgtaatccttctgcatatccctgtatcagtgctaacggtgtttttaactcatgcgagacattggataaaaattccttccgcatctcgtcaatctctgtttttttctcaatatcctgctgcaactcattattcgcacttttcagttccgaaattgtcttctcaagtgtgcaggataaccggttaaaatgttctccaagttcgtcaatttcattctgtctatgtgcatttggcgtatacttggcgttaaagtcaagttctgtcattctttttgaaatatcggtcagcgccagaatcggtgtcgtgatccgtcttgagacgaacaccgtgacaaccgcactgatcacaatcgcaagcatcccgacataaatcaaaaaccgattcgatatcttggcactctcgcggatactctccacagcagtacgcatcaggatcagattgccattggaaagcgtaccgtaaagtaccatgtattcggatgacagtcttgtatctgtctgcttctgtatcacataattatcggcttttttcaaaatctctgtctggcttccgtcacttccaaacaatatattcataaattccatcagaatgacctgattatcattgacggaagaccgcacgatcgtccggtcggaacttatgatcataactgctatattaccattggcacataaattatcaaaagtaacatcaaatccactggagtttaattctcctgtctcgctggcataattgatcacatcatagccatctatcagtgaatcctgcttatgcagcatataatatttttccagaaaagttgtattgataaaccagcataaaataatcgttcctgcgacaagcccgactaaaataatgaccagttcacgggtcagtgaccctttttttgtattcttcatattacattgcttcttacttatttcttctaatccaatttaaatattatgctaaccacccgttattgtcaatgcattttacaaacatttcacctgtagtttactctacaataaatttatagccgacaccccagattgtcttgatatactcaccttttttcccgatttttgcgcggagtttcttcacatgtgtgtcaatggtcctcgcatcaccaaaataatcataattccatacattgttcaaaatcttctcacgtgagagtgcgattccctgattttccataaaatagtcgagaagttcgaattccttgatactaaggtcgatctgctctccgtccaccgtcacaagatgcgcagtcttatccagcttaattccaccggcttccacgaatttttcttcatttccggcggtcagtccgctcctgcgaagcagtgcattgactctcgccactaatattttcggtgaaaatggttttgaaatgtattcgtccaccccaagttcaaatccggtcagctcgtcgctctcatcactttttgcagtcagcatgatgatcggcactttcgatgtctcgcgcacctcgcggcatacttcccagccgttgagttttggcatcatgacatctaaaatgatcaaagcgatatttttttccttataaaaaatatccagtgcctcctcaccgtctccggcttctaatacttcataatcctgccgcatcaaaaagtcacggactaattttcgcattctgctctcgtcatctactacaagaatttttaatctttccatgtcatcctccgattttgcctgttctatgctaaaaatatcacatttttatggctattctgtgaattcagactgttccggctctgcttcaatcccaagttccagctctttctcatgcacagccttttcgcgctccgtaagttcctgctcccaggatgcatagcggttcaaaagctttgactgataatctacaattgtagggctgtcacttgtcagtgtgatcacaaacatcgcgatcacgcacacaacaagaaccacattcacccagaccgaaatctttaactttccggaagattccgtctccaaagctttcttgtcgatcttctcctgctgtctttcccgctttctcgcacggactgcacggacacgttccttctgtgcgatctcacgtttctgcctttttaagctttcttcgaggcgtggatgtgtgaccgggattgggagaatatcttcgtttttgataaatgggatcgtgatcagatattcctgcagatctttcagatagctgtatcctaccgccgtttcaaacagtttctgttcaatcattttgttatatacctgtaaaacgatctccggatcattcatatcggtttttgtcttgatatatttgattccttcgatctctttttttgcctgttctgcttcgtcctgattttcaaacgaaaatccgccgacacgtattctctgtgtattttctggcattcgtctgccctccgcttttccttacacatatttcctgtaactgctcgttaataactattctgcaccacattcgcaaaatcgctctttcagcgttttacatacattataaaaaatcacaccaccgtttgcaagttctatccatgcagatataaaatgctttcctccgggatttccagatactgcggcatttgtttccggtagtctttctgccagctttccctggaaattttccaccagatatcatgttcaaaaacaacgacaagttcaaacggatcatctaagatcctgccattgtggcatgtcaccagatttgtttttttaccttcttccggaagtctcagataatgtgcccggattccgatatgcgtggtattctccgggattgttccctttacctgaatggtgatattccagtgtggcacaatcatcgtatgtgcatctgaccgtatgaccttctcaatattcttacagcctgtcagttttgcagccgcaggtgtgcccggatttttaaaaatgtcctttgttgcgccaaaacctgcctgtctgccattttccacgatcagcatatgctcacagaaacggtagatctcgtcccggctgtgtgtcaccattaaaatatctttgtcataagcagctaaaagttctgacagctctaattgcaatttttcctttaaaaatgcatcgagtgaggaaaatggttcatccaacattaaaacttccggatcagacgctaagattctcgccaatgctgcccgctgctgctgtccgccggataatttgccgggataagcatcccttaattctgccacatgcagcagttccatgtattcatctgctttctgcccgatttcttccgcagtcagcttctgtttgtggcaatacttaagtcctgttttaatattttcttctactgtcatgttcgggaaaagtgcataattctgaaacagatatccgacatgcctgtcctgcacacggagattgattttctgttttgaatcaaacagtacacgtccattcaagacgattcgcccctgatccggtgtctcaatccctgcgatgcatttcagtgtcatactcttgccgcacccggacgctccgagtattccggtgatgcccttttttccttctgtgtcaaaagaaaccgacagcactttgtcattcagttttttttcaatctcgacctgtaagctcatcgtatcttctctccacgtaagttcatacccgctacaatcagcaatgaaaatgctacaattattaacacatattttccggcagtatccatatctcctgccgccacttccgaataaatggcaagcggtaaggttcttgtttttcctgcaatatttccggcgatcatggctgttgctccgaattcaccaagcccccttgtaaatgcaagcacaccgccggagaggattcccggttttgcctgcggtaaaatgattttccagaagattgttcgttcgctcattccaagtgtcctgccggcatagatcagattttgatccacctgctcgattgctcctctggcagagcggtacatcagtggaaatgaaatcacgactgccgccaaaacggttgcctgccagctaaaaacgattttataatgaaatactttttcaaaaagtatgccgactggtctttttgcgccaaacagatagagcaggaaaaatcctgccactgtcggtggtagcaccagtggaagcgtgagcagtccgtctaaccacgcccgcgcttttgtggagcggactgacacaacacccctggctgcccacagaccgagaaagaatgtgagaatgatcgataccaccgatgtttttaacgagatccataccggagaaagatccatttttctgtgcctcccaaaatgcttgtcctacatctgctttgcgttactgatttatcgaaaatccagccgcttcaaataccgcaagtgcctcatctgtctgtaaaaattccagaaacgcatctgcggcttctttgttcttagtctcttttaattctgccaccgggtaaatgacttttgaaacgctctcttccggtgcctctgccacgactgtaactttgtcggacatggaagctgcatccgttgcataaacgattcctgcatcagcacttccctctgctacccagtttaatacctccgtcacatttgttccgagacttaatttgccctccacactgctccagagattaagattttccaatgcctcttttccatactgtcctgccggaacactctccggatcaccgattgcaaccatatctgcatttacaatgtcctcaaaagaagtgtagccgtcctcttttccggtcggaacgatcagaacgattttattttccagaagatccacagatgcatcctctgcaatataaccttcttcctgcaacgcctgcatctgctttaatgctgcggaaaagaaaatatccacatctgctcctgcctcaatctgtgactgaagctttccggaactgtcataagttccctcaatgttcacatcaggatactgtgcctcaaacattgggatcaactgctccgtgaacgatttttccagacttgctgctgccgctaaggtgatcgtaccctcgattgcggcacttgtatctgcctctgctgcttctgtgtccgctgtcacctctttgttttctgcctgcgcaggtgcatctgcactgttctggctgcctccgcatgcagtaagtccaaggctaattgctataagtaacatcattgcggttaatttcttcatgattttcctctcttgatctattttccagcgcaattgccagtgtttccttttaaaatatccaatccatgcgtcagtgctccaatcgcatattccagacactcccgcaccgctttcgggcttcccggcagattcacgatcagtgcttcctttctgattcctgatacacctctggacagcatggcacgcggtgtgatctgcagtgaataataccgcatggcttcggaaattcccggtgtttcccgctcgatcgcctgcatggttgcctccggtgtattgtccctttgtgaaaagccggttcctccggtcgttaagatcagatctgccttatctgtatctgccagttcacacaataactttgtaagttcctctccgtcgtccggaatgattttccgaaaaacaacctcatagcctgcttttgtcacaatatccgcaatggtctgaccgcttacgtcttcccgttctcctttagatgcggtatcacttaatgtaatgactgcaacgcggtactgcacatgaaattcatcccccgtctgaatcgttccaccgtgaagcactctggcaaaaacaccattcgtcggcatgatgcactcccccattttctggaaaatctcgcagccgtgatgacattcttttccaatctgtgtcagttccaacacaacatccttgcacgcaaatctcgtaccgaccggaaactttgtaaaatcatagccactgaccacaagattttcaccgaacgctccgtctgtgatctctgcgccacgcgccttaaacgcctcgattgtctcctgcgacaatagggaaacctgcctgtgccattttcctgcatgcgcatccccctgtatgccccaatcctccacaaatactgcggattctatatttttcttctgcgtgccgcgtttctcgctgatgcacacagcccttacttttcccatttttttactccttttaatagacaaatgcgaaactctatttgtttctcgtgattgttcaaaattactccatcagcctccgatttcaaacatactcctccgctcggtctgtcctgtctcattttgtttttcaaattcgtgacactttggcttttctttgattgccttttcaatccggctttgcagtccctcctctttagcaccgcctcgcagcaatgtccgcagatccacgcctgtctcatactgtaaacatggttttaagaaaccatctgacatcaggcggacacggttacagccactgcagaatttatgtgaaattgagctaataaatccaatttttcctgcaaatccatcaatttcaacatagtgtgccgggccgcttcccagtttctgagtgacaggttttaacgttccatacgtttccgaaagcatttttattatgtctgcttcctttaacgtatgcttttcttttccctgtccgatcggcataagttcgataaaacggacactgatgttttttctggcaaattcggtcagggcaagtaattcctcccgcgtctggtgcatcagcacacaattaagctttactgaaacgcctgctgttttctccgccagttctatgccatttaataccttttgcaggctgtcacttccggtgagattgcaataaccttctgcatccggcgtatccagactgatattcacaccgtctagtccggctttcacaagatgtgcaaactgctcctccaaaagcactccgtttgtggtcagcgttactttttccattccacactctgttttcaatcgataaataagttccgatatctgtgctctcaccagtggttctcctccggtaagcttcacatttttgatcccaagctttcgaaaaattcctgcaagctttacgatctcatcatatgttaatatttcatcctgatccgaatagcatttgccattctgtggcatgcagtaggtacagcgcagattgcaacggtctgtgactgaaatcctgatataatcaatgttccggctgtactgatctaacattcttttctttccttacttcgctcaaaaagtccggattttccaccgtcttttttttctaaatgaacatcaataatctccatggcacggtccattgccttacacatatcataaatcgtgagaagtgccacattcacacccatgagtgcttccatttccaccccggtctttccagaaactttgaccgtacacattgctgttatgatgttttctttttcattgacttcaaaatcaacggtacatttgttcagacaaagtggatgacaaagcggaatcagatgagacgtctgctttgttcccataatccctgccactcttgcaaccgtcagcacatcccctttttttgcggtatgattgacgatagctgacatcactgcatcattcacacggattttaccgcttgctgtcgcgatacgctccgtaatctctttttcagaaacgtctaccatgacagcgtttccgttttcatcaaaatggttccattccatattttatattcctgctttttctatctgtttttttctgcaaaacgattcctataaaatctattctgcttcagacttttccaaacgaacagtccgggaaccggcactctgcacatccaaggcacagtccgccatgtcctaacacataaaaatcttccgctttcaccggaatccctgctgcaatacgcggtagcataatgtcaaagatcgtgctctttgcatacatcacgcagcccggcagccccataaccggggttttgtcctcaaagtatccgagcaaaaacattgcgcccggaagcaccggtgcgccatatgtgacgatagaagcccccgaacgcttgatagctcccggtgttcggtcatccggatctacgctcatgcctccggtacagaggatcatatccacaccttttgccttgtactccaaaattttttctgtgataaggttctcatcatctcccggataacagtgctccactgtctcgattccataagctttcagcttttcaatgaccacatcagaaaaggtatcctgaatcagtccttttgcaacctctccccccgtagtgatcagcgccgcggtctttaactgatatggcaggacattcacaagtggcgcttcccctgctgcccgctttgctgcttccattttctctttttcaataattaacgggataattcttgtcgccgcaagcttcgtgccttttttcaccggggtataggaatgtctggtcgcgatcatcatattgccgagtgaattgacggctagaagcttttccacgttgacggttaaaattccgtcaatgtcagaggtgagttctatttttccctcttttggctctgatgcatgcatatgctcgccctgacagatagcgcgcaggatctctgccgcctcatcctcgtgaagcatgttctcatttttctcccacacgtagagattttcttttcccatagataggagaaccggaatatcctcctcggttacaatatgtcctttgcggaatcttgcgtcttttgtgacgccttttatgatctgcgtcatgtcatgacataaaacatgaccgacggcttcctctgttttgattaatttcatttatttttcctcttgttttctatcgaacattactttgcatggtgcttctctcttttccacaccaagcacatactatttcatcttactcacacgccttggcattcggatagatccgcgccattttcgcatcgtcataatgctcgtccatgtaaacctgccagctttctgtcgcctccacctgtctgtcacgctcatcataccttatcaaagcaaggcaggaaaacacaacattgcagcacataaatacgatcaacagccatgttattgtttttccgatcacaaccggaattttctcgatcagacctgaaatttttggatacaatactttaaaccatactaccgctgcgattccccagaagaaacagtataacagattgattcgtccacccaggttaaacggcatccagctgtaatcccagaatacttttccaaagaccagctctgtgaatacactgcacagatactcataagctccacctaaaaaggttcctgtccagaataaaaagccgtcgcttttgtctttgtatttatataacattgccgtcaccagcgcaatcgcaagtccccacacaatactgaatggtccccacacaacgctgctgcggctcatccatactcccgcagtgatccggcagaaaattgtttccgtaagatctcctaaaaatgctcccacaaaaaacagcatcacaattttataaaaatcgcatccttttgcaaaaacagttttatcttttgtgattttttccacaaaacttgccttcgggtaggcttttgtcattcgtttttcaatcgatcctgcaatcttattgccaagcctgatgcggaaacgatcgattttgttatttgcttccagccacttctccgggtgtctgctctttcctgtcacaagcagataggaggcgagtacatccaccacaagcacaccgatcagcaccagcagaacaatatgtaccaaaagctgtggcagtatcgcaagcaatcggaatacccaccggttggcatacttcaccacaacataacccaatgcaccttttatcagggaaaccgggagacagatgtaaccgtctaagttccatttactcttactgtaatcccaccagcgtttatgatagaatttctcaattaattttcctgcaacaaactctgtcaccgctgcatataacgatgtgaacaaaaagagccagattcccgtcagctcctgcagaccgactgacattgccacagctcccacaccataaaggatgcataacgggccgtttaccagcccgcggttggaaaatttccggtgcataaacgttgccgcggctgtctctatcacccagcccgcaaaagaatatataaaaaatagccacaataaatcatatccggtaaactgtatcattcgtatgtcctctttctgtttattcttctataataaacatagatatttttctcgaatacactcttagattatatagaagccgccacttttcttcaagtaaatttaaaaagcctttgcagaaaattctttccacaaaggcttttcaatcacttaaatttgataattatcttcttactctttttttcgcataacagaatgctgtaatcgcgcatccggcaaataatatccataatactgccatactgccgttatcccctgtttttggagaagttgtcatggtctctgctgttgcagaagctgtattgtccgtctctgttgcctgactctgtgctggttctgctgttgttgtcggatttgtcacagagcttccaggtgtcgtcggatttgctggcgttgtcggattttccggtgttgtcgggtttgctggtgttgtcgggttttccggtgttgtcgggtttgctggtgttgtcgggttttccggtgttgtgcttgtatcgtctgcttccgcaaaaatgaatgtactaaaatgagttactgtgaaagtaatggtacggtttacaccgtcataaatgtatccaccattttcaattgtaagtttctcatttaccgtactgtctgcattcaaatgtaaaataacaagtttactgatatcaataccttttggaattggcattgtaatctgtactggaacagctaaattgtttacatcgtttgctccatttaatgtaattccaagtgaaacacaatttttgtaaagagtagagtcaacgcttgctgcatcttcctttgtaatctttaaaccaacatttgttacccctgctgcagcatttagtccagcccctattacggaaatatctcctgcttcaattaaatcacctgcttcggcagatacatccggtttatcaacggcgattcctgctgtttcggtatacattttttcgattgccccgatgctggcacgagtgtcactattggtctgtaatgccacttttaactcgtttgtatcaaggctatccagtccttcttttaatgctttggcaatggtaactttatctgcatcggatgcattattatagatcatgtttaatgtgtctgcatctgctttctcaacagagtcaacccctgcctctttcagaacattatttaaagtatcctttaaattattgtccacatcttcgccttctttggaaggattataaacatctgtaaataattcgtcactgtttgcaactgctgtgatatcgttacttaacgttcttataccaactttatagagataaccttcctgtaaataattactataatcataggtcacaacatcagaattaatatagctgcttctcttacttcctggaacatattcattaaatgaaacaccattatcagaacttcgatacagaaaataagtatatccatatgccccttctacagctggaaacgatactataccattttcgaatgttgcttttgttatatcaacttctggcattttactttccggtttcacataatcatatgttatactctgcactttagaatatgaattatctttatatgtaattattctccattcatatgttcccgattcattcatatatttaatagcactgtcatttttttgctctcctgaatgatcaggtagtgtcaaaaactacccattttattgttctaaaattcttttaaaaccttgatttattggaggtttgcaaataaaaagagcattgacctcccaaaagaagtataatgagttcaccacaaacaccattatcaacaaggagacaacgctcatggacattatactttatttacttctatttattcaataccaacataaacaaatctgctggctttttaattttatctgcagatatattccccttaagcagtgggtcttcgatgattcccattctcccaaatatcaaaaattcaagattgataagctcccaaaaataatctattacgaaaaatgggattacaaagactacattccttacctcgaatggaagtatggcaagaaaatcaaacctgtcagccgccgttctgaatgtgatattgatgacaactgtgcctgtccacgttgcaatgctccaaagccttatctctacaagaataatggttcaaaaggacagattctgtgcaaagtatgctccaccgcattctctccggaagaa

SEQ ID NO: 14298 - DNA, 159040 bp, Unknown
  gut microbiota DNA sequence
ggcagaatccggaaaatcggctctgcccatttgtaactattcataaatcttatatcagtttttaacgtttacacaaaacttgaaacggtctccctttttctgcgagttcattttgaatgtcatctaaaatctcttcggattcagcttcaatcgtatggtaatgataaccgccggttacattcttaagaaggctggaacttccggtagagagtccttctaaaaatttcttgacatcgcgtcttgtacggatattcatatcagcccggacaacaccataaaccttgtgataaacaaaaacatctttgacaacaccgccattatcaacgatcagagagagttcttctccaacctgatcatctgtatggatcactttaaatacccgctggcaggcggattgttttggaataatataacctttgtttgtagaaagaatcgtcaggccattcgctcgaagaagagcaatgtccgaaacgatgatctgcctgcttacatccaggtcttttgccagagtaactccaggaacaggcacagcgctggatttcaaaatattttctatttttgctctcctgatctctccgttcatctgtcaaagtcctttctaaactgcatgtaaatttttaagtgaaatatccaaaattggagctgagtgagtcagagcaccacttgatatatagtttacaccaaagttcttaattctttcaatgttttcttttgtaacatttccggaaatttcgatttcggctctgccggcaatataatcgatggattgttttaaaagatcattatccatgttgtccaacatgataatatcagcacctgattccacggcatcctgtaccatttcaaaagtctcaacttcaacttcgatttttcttacaaaaggtgcatatgccttagccattttgacagcttcttttacaccacctgcagctccgatatggttatccttgagaagaacaccatcagaaaggttgtatctgtggttatttccgccaccgactctcacggcatatttttcaaaaatacggttgttcggtgtagtctttcttgtgtctaaaagcttgattccggttccttcaaggagctttgctacctggcttgtataggttgcgattccgctcattctctgaagataattaagagcagttctctctccgcagagaagcacacggatatcaccatgaacctttcccataagttcaccggcttttacatggtcaccgtcttttacaaaaaattctacggttgtattggaatcgagcagagtaaaggttctttcaaaaacctgaagaccgcagataatgccatcttctttgcagatcaagtctacctcgccatgctgtggatgtggcataacactgtttgtggatacgtcctcacttgtgatatcttcttttaaagcacttaatataaatgggtctacatttaaccctaatgttacctgatcgtacatattatctcctttcgccagcaatttcttttgctgctctttttgcaaatacaagactctctaaaagggagttgcttgcaagtctgttttttccatgaaccccattgcatgcggtttctccgactgcgtagagatgatccatagaagttttactgttatggtttaccttgattccgcccataaaataatgctgagccggaacgatgggaatacattcatggaacacatcataaccggcctggctgcaatgttcaataatatttggaaaatgacttattaattcgtcacgcgggatggttcttaaatcttcccacacaaaatcggtgccgtctttctccatctgtttgtagatttcctgtgtaagcagatctcttggcagcagttcatctacaaaacggttcatattcttatcataaagcctggcaccttcacctcttacagattcagaaataagaaagcttctttcttctttattatcagagtaaagagtagtaggatgaatctggacataatcaagatttttcagttcaatattatgacgtctggcaatctccacgccgtcaccggtcaggtgtttgaaattagtggaatgcttgtatgttccaccaataccgccggttgcaagtattacatagtcagcttcaacctgttcttccctgccatccggccacctgataattccaccacaacacttgctgccatcgcaaaggatatctaagagagtcgtatattcatacattcttacattctttaattttttgacggcatttaaaaggtggcttgtgatctcttttccagtgatatcttcatggaaaagtattctgtgatgagcatgtgcaccttctcttgtatagacaaaatcaccattttcgtcccgggtaaaagagacaccgtattttaccaaatctttcactacatcaggggaagacttgatcatgatctcgacagacttctggtcattctcataatgtccagcttttaatgtgtcctcaaaaaagctgtcataatcagacggatcttttaacgtacacatgcctccctgagccaaaaaggaatcactgctttcaaaatcagacttcgtgatcagcataatatctaattcctcaggaagatttaagactgcatataatccggaacagccacttccaactataagtatatctgttttcatattcttttcctattcttttatgttaataaaatagtgtttttttacagattgctccaagtataacacttaattttacaactgacaagacacctgtaaattttttgtgttgacagtgtatatttcaaatcgtatacttttactaaagtgagcaaaaggcagtgagatccggtattgatactgtcgtttggaaaacaaattaaaaatgaaatcacattaagacagaacgaataccggaagaagaaagcctttctgtgataaaagagggaaagatgacgacaagagaaattcaggacgagatccttagattaaaaaaagaaaaagatgtatgtattcttgcacatgcctatcaaaaccatgagatattagaagttgcggattatatgggagattcctttgcattgagccagcaggctgccaaaacaacggaacagacgatccttatgtgcggagtccattttatggcagaaaccgtgaaggttctttcaccagacaagaaggtacttctttccagcagtgaagcaggatgtcctatggcagaacagctttcagtggaagaattgaaagaattaaaaaaacagtatccggattatacagtagtagcttatattaatacaacttctgaattgaaaacattgtgtgacgtatgtgttacatctgcatcagcagtatctattgttaagaagctggagaacgacaagattctttttattccggactgtaacctcggagcatgggtagcagaacagattcctgagaaaacttttaaatttatcaagggtggctgtccaactcatcttagaatgggcaaagcagatgtggcaaaagcaaagaaagcacatccaaatgcgaagctccttgtccatccggaatgtgccgctgcagtaaccaagaatgcagactacataggaagcacaactggaattatgtcctatgcgaagaagagtacagataacgaatttatcattggaacagaaaacagcatagtttcccatttacagtatgagtgtccggataagctgttttatccactttccaaggattgtgtatgccacaatatgaaacttacaactttagtagatgtatataattgtctgaaaggccttgcaggtgaagaaattattttacctgaggaagtaagtaagggagcaaaacgctgtattgacagaatgctcgaattaaattaacacaggcggtcgtagaggtagattctccgaccagtgctgtgaaatttattctatagactgtgagaatagcgtctatacaatctcagttaggacaatctcagttggtacagaaggtagaagtattttcttgcttctgcttctgcttttgtgctataatcaaacaaagcatattttacaaaatcttcatgacaattttgtcatctatattctaagaactacagattagtttcccaaataatctgtgtgtttcattcgtatctatgctttttgttacccatcaacaattgaaaagcaggagacgaacgaatttagagatagtatctgttactctcctgttaggacagtgtttattatgaactgtcccaccaaaatcaggaggaaacgatttatggcaaaatgcaaaagaaaccggaacaggacaaaaaggcgttttacagtcaaagaaccaaaggcaaacaggaattataaagacactgtctttcggatgctgttttctgacaggaaaaatctgttatcgctttataacgcagtgaatcagacggattatagaaatccggaagagttggaaattgttacattagagaatgccatatatatgggtatgaaaaatgatctggcatttatcatggataccaatttatatctttatgagcatcagtcaacttataatcctaatatgccacttcgagatttgttttatatttgcagtgaatatcagaaactcgtggataagaaatcactgttctcttccaccttacagaaaattcctgcccccaattttattgaattttataatggttcgacgggaattgctgattgcacagaacttcggctttcctcggcatttgagcatttgtcaggcgagccaaaacttgaattggttgttacggttttcaatgtcaatgaaggacacaatgcagagttgatgcagcattgcagtatgttaaaagaatatgcacagtatgttgctaaagtacgtcactatgcggcatacatgcaattgaaccaggcagtggaacgtgctgtaaacgaatgtatccgggaaggaatcctgacagaattccttatccgaaaccggagtgaggttattaatatgagcatttttgagtatgataaagaattggaagagaagaagttgagaaaggcagagtttgaggctggtcgtgagattggacatgaagctggactggcagaaggcaaaaatcaggctgcttttgaaacagcaaagcgtatgcttgctttaaaggaattcacatctgaaaagattgcagctatttcaggactttcgttagatgaagtgaaaaagctgcaggagtagacggtcagaaaaagtaaagcagatgaatgaatttacaaatatgatatcaatgacaggagaaaacaaatgaaataccatactgacaatgaattacaaaacttcagatttgagggcgcatacattgcagaaacctgcgcagtcaatgggatctttgaaatgatattggacaatgtgacgattttaccacaaaattcgtgcaatcgtgatatccgcgaaatgcgtgcaaatgaactgaaactgaaaatccgtgagccggagataacggcatttgtcgaggaaggctataaagtttatgacgcagatggtaatctgaaagaaaagaaagaggatatactgatcgcggcagaagatcaggcagcaaaattaaaggaactggaaggatgcgaaatctattccatcgagcaggagaaaggtgtctatacggtatccattgatacggaagaccatactttcatgattaaagtaagtggaagcgcagatgtcgaagagtgggatcggtttctgagtaaagattaaaggagcagggattacgatggaaacaaatgaaaaaagccgtgtgctggatatgacaaggggaaatccgttccggcttgtattaaaatttgcgctgccactgttttttggaaatctgctacagcagttttataatctggcggatactgcaattgccggacatgttctgggagatcacgcactcgcacagattggagcagtttcggcgctatatggacttatcacaaattttgcatttggaatgaacaatggactggcgttgtctttaagccgcagctttggagcaggggatgagcaaaaaatgaagcatgtctcctgctggatggtaacaatttccatgtcggtatccattatattaatgtccatttttctattgtgtaaagaaccgctactgatccttttgcaggttccggaagagacgatggcaggtgcgatggaatatcttacgatcatactgatcggaataccatttacgatggcgtataatatggaagcagctatgcttcaggcggttggaaacagtatgacaccccttttgtttttgctgttcagcagcgttttgaatatttcattggattatgcgtttatggcaccactggcgatgggaatcggaggtgcagcgtttgcaacggttttatcacagggggtaagtgcatttctggcattcatacttatctggcgcaattatccactgcttcattttaaaggaaaagattatcaggtggagaaaaaatttgtgcttgaaatggttgttgcagggtttagcatggctttgatgagtgcaatttataatattggaagtgttattttacagggtagtattaacgcactcggaaacctgtatattacggcgcaggtaggcgcaagaaggctggcggaactttttcatacgccgggacttgcgcttggaacgagtgttgcaacttatacgagccagaacatgggtggcggaaatcgaaacagaatcaaaaaaggagtatggtcagcattctttctttttgcggtctggtggattttttccatggtttttgtgactttcttcgtggaagatgccgtcagactggtaacaggaagcagtaatgcggatattatttataatactgcattatatctcaggatcagttttccgttgattcctacgatggcagtgattattattttgagaaatatgctgcagggaatgaatcatttgatgatgccacttgtgtgcagcagtctggaattgataggaaaggtaatttttgctatctgggtcgtgccggcatatgggtattttgcagtgtgcctttgcgaaccggtcacatgggtggtctgctgtatttttgttttgatctgcgcatttttgtgcaggaaggaattgagatagaagcttaacgagaaaacgtttcaataacagtgttgacacgttttctttttttgtgtaatatatgcctataagttagatataactaaccgaaaagcaaaggagagcaaagtgagtcaggaagtatatgagatgatcacaagattagacagagaaagaattgagacacatctggtcgtacagtgtgcaccgatgatctccggcatgaaggtttctaatttactgaatgtggagaaaaaacttgcaccacagatgaaacaggtgttggaacgttccggtatttcctattatctgctgttggaaagcgaagataaagcaacctttttagtgtaccacgaggatgggttgaaagcgtacctgatgcaggatagagtctgtcagtcgatgaagagttttggatacgaaagcctggatttaagcgatgttttaagccgttttcagaaacgctatgcaggctgtatggagcagattgcagaatttccacatgagatgggattattgctcggttatcctgtggaagatgtggagggcttcattgagaacaaaggtcacaattatctgtattccggttactggaaagtgtacggacatgtagaggagaaaaaagctttgtttgacagatatgaggatgcaaggaaaattttgatacagctgcttgcgagtggacgcagtgtgagcgaaatggcttcctgttacgcttaaattttactcatgggttagcgtatactaactacataaactgataaagaatagaaaatgcaggaatgtgaaaaaataaaaatcataaaactgcaggtagtatggaggaaaaaatcatggataaagtaacaatcgtattctggtcacagtcaggaaatacagagagcatggcaaatgcagtagcagagggcgttacagcagcaggaaaagaggcagttgtcgttgacgttgcaagcgcatctttggatgacttaaaagctgcaaaaggatttgcaatgggctgcccggcaatgggagcagaagtgttagaggaaggcgaaatggagccattcgtaagtgatgtggaaggctttgcagcaggcaagacgatcgcattattcggttcttatggctggggcgacggacagtggatgcgtgactgggtagaccgcatgagcgcagcaggtgcaaccgtgatcaatggtgagggtgtgatctgtcaggaagcaccagatgatgatgcgatcgcagcgtgcaaagatttaggaaaacagttggcagccttataataaggtaagaagtattacgaaaggacaatttatgagcgtagtcattattggaggacatgaccgcatggtgtgtcagtataaaaagatttgtaaggaacataaatgtaaggcaaaagtatttacccagatgcctgcaaagttgagcagccagattgggtcaccggatctgattatcctgtttacaaatacagtttcccataaaatggtgaaatgtgcggtagcggaggcagagcgaagcaatgctgaggtggtaagatgtcactccagcagtggaaatgccttaaacgagatcctggaaaaagtttgttaataatgtacgaaagaagcagagtgaaagagcaggttaaaagagggctttttcattctgcttttttgctttttcttgctatttgagggcgcatatggtatagttcaaacgaactttaatgaatatagaaaacaaacaggtgtcagatagacagaaaaaattctgccggatctggtgaaaagggaaacaggtgcgaatcctgtacgaactcgtcactgtatttagggagcgtatgctaaaaactcactgggcaaccgggaagagggcaatgcgcgtggatctatgagccaggagacctgcctgatttgttgtacgggaaacaattcgtttccatgccacgagtaactggctgtacggatgaggaaaatggaactgtcgcaatgcataaggaatggaaaagtgacaggaatatttgatcgcaggattttttgtgcagcgtttctttttggaaaaaaagaggcgcttttctttttggtgtacacagagatagaaaaaatcattttcacaatgcatgatctcatccataactatggcagaaggtgtggagaaaggataggacatgcaggagaatttagcagaaaccacagtatgggaaaaaggaatacatgtggatcttccggacggagaatatgagatagaagcggtgttaacaggtggaagcggcagggcgacgatcacctcgccggcaaccatttttgtgcaggatgaaaaagcagttgttgagatagagtggagcagccaaaactacgattatatgattttagacggagagacttattatccggtcaatacggagggcaattccgtgtttgaacttccggtgacagcctttgacacagaggtggctgtgacagcagatacaactgctatgagcgtgccgcatgagatcgattacacgatatttttagacagcacatccatagcaaatcagggagaaaaaccgatggcagtaatcgcggttatctatgttgcggcagtgatcgccgtcagcgtggcagcatttgcgctatatcggaaaagaaaagagaaaaaggcatgaagcagggaaaacgaatcggtatcgtggttcttttttggctgatgatcgtggctgtggcagtaggctgtggcaaagacacggattcgtggaaaatgacagaccatacgatcagtaaggaacttacatacgagacaagcatgaagttagattatgcgacagagttcgcagttgattattatgacaatggttttacattgatctcgatagcggacaacagcagatttttgttaaataccgaagataaggaagtgccgcaggacttagcggacgatattacagttttaaaagcgccggtgtcggatatttatctggtcgcttcggcaaccatggatatgttttgcagcatcggggcgttagattctatctgcctatccgggctgaccgcggaaaaatgggagattccggaggcaaaagaggcaatggagagcggacagatcctttacgccggaaagtacaatgcaccggattatgagctgatctgttcgaaaaactgtgagcttgccgttgaatcgaccatgatcggacatgcaccggaggtaaaagagaatctcgaatcctttgggattccggtactggtggatcattccagttacgaagcagatccgcttggcaggacagaatgggtaaaactttatggtgtgctgaccggaaaagaggaggaggcatcgaaggcgttcgaagaacagaagcagtatgtggaagaactttcggatgccgaagatactggaaaaacagttgcatttttctacatcacaacagcaggaacggtcagcgtgcggaaaagcaatgactatgttccgaaaatgatcgaccttgcgggaggcagttatatttttgaaaatttaaagggagaagataatgcggcttcaagcgtgaacatgcagatggaggagttttacgcacaggcgaaagatgcagattatttagtctataacagtaccattgacggcaacttggaaacgatagaggatctgcttggaaaaagcagtcttttcgaaaattttaaagcagtaaaaaatggaaatgtctggtgcatcggacaaaatctttatcaggatacaatggataccggaagtattatccacgattttcatgagatgctgacatcggaggacacggatgaacttacctatatgtacaggctcaaatagaaaaataaaatatacggcatgctttgtgattttagtcttattgcttgtgatttttttcacgatcagtgtgtgtgccggaagtgtgtctatctctgtggcagacatatggggacagctgaccggagagggagacgagctgtatacaacgatcctgtttcagatccgcataccgagaacacttgcagcaattctgctcggtggggctttggcactgtccggatatttgttgcagactttttttcacaatccgattgcaggaccgttcgtacttggaatttcctccggggcaaaattatttgtggcggtcgttatgatcgtatttttaaagtggtctcgcacattatcgtcggtagatctgatcgtggcggcatttttaggatcaatgctctccatgttttgtgtccttttaatgtcaccgaagatttctgatatgtcgtttttagtgctgatcggtgtcatgatcggctatatctgttcggctgtcacggattttttagtgacgtttgcagaggattcggatattgtcaatcttcacaattggtccatgggaagtttttccggtattacgtgggaaaatgtgaaaacaattctgttagtggtagcggtcaccggcattatgacgttctttttgtcgaagcctatggaggcttaccagttaggtgagacttatgcaaaaaatatgggcgttaatatccggctgttccgcgtcctgcttgttctgctgtcgagcattttatctgcggttgtgacagcatttgcaggtccggtttcgtttgtcggaattgcagttccgcagattatgaaacggttctttcagaccgcaaagccaatcgttatgataccggcatgttttttgggcggggcagtgttttgtatgttctgcgatgttttagcgcggacgatattcgcaccgaccgagatgagcatcagcacggtcacagcaatttttggtgctccggtcatgatcgcagtgatgttacggcagagacagaagcgatattagtgtagcaacgagtaagtagcagagacagaggaagacattcgtgcagaaatgtgttgtcgcggagaaaggaaagttatcagagcagaaacgaggtgcggaatgaaagcacagagacttttacatacagagcagttatccgttgggtaccatggaaaaaagctgatcgaaaatattgaaatctatttaaaaaaaggcgagatcgtcacactgatcggaccaaacggagcaggaaaatctaccattttaaaaacaatcacaaagcagctgcaggagatttcgggcagtgtttatgtggaaaacaccgcattaaaaggaatgccggaaaaagagctggcaaagaagatgtcaattgtatttacagagcgcatcacaccggagcttatgacagtccgggatgttgtggcaatgggaagatacccttacaccggaggtcttgggattcttacaccggaggatgaggcgattgtgcagcagtgcatggagcagatacggatcgcggatttaaaagaccgggatttcatgagcttaagtgacggtcagaaacagcgtgtactgcttgcaaaagcgttgtgtcagaaaccggaaatactgattttagacgaaccgacttcctatctggatgtgaagtataaactggaatttttatcgatgctgcaggaaatgacgcagcagaataagattggtgtgctgatgtcgctgcacgaactggatttagcagagcgtgtgtccgataagatcgtctgtgtgaagggggataagatcgcacatttcgggacaccggaagaaatttttatagaaggttttatcaatgatctttatgagatcacagagggaacatttcatgaggcaaatggttctgtggaattgaaaaaatgtgtgggaacaccggaggtatttgtcattgcaggaaacggcaccggaagctttttattccggcggcttcagcgggaaggcatcccgtttgcggttggaatccttggagagcaggatgtggactatcttccggcaaaagcgctggcagacactgtgatcgcagagaaagcttatcaggacttttccaggcagcggtatgaggaggcaaagcaggtcatgttttcctgcaaaaaagtgatctgttgtcagacaatatttggaacacagaatgaacgtaacaggcagcttttaagcgaggcggaggctgctggaatggagattgaattatggcaaaagtgatcatggttcagggaacaatgtcaaatgcagggaaaagcctgatcgtggcaggactttgcaggatttttaaacaggatggctaccgtgtggcgccgtttaagtcgcagaatatggcactcaattcctttatcacaaaagagggactggaaatggggcgtgcacaggtcatgcaggcagaggcagcaggagtggaaccggtcgttgccatgaatccaatccttttaaagcctacgacacatgtaggttcacaggtgatcgtgaacggcgaagtgcttgggaatatgagtgcgaaagactattttgcatataaaaagcagttgatcccagagataaaaaaagcattcgggcagcttgcagaagaaaatgacatcattgtaatagaaggagccggaagtccggcagagattaaccttagggaaaacgatattgtcaacatgggattagcagaacttgtggatgcgcccgtgcttttagtgggagatatcgacagaggcggtgtgtttgcacagcttctcggcacgttaatgcttttggaagattctgaaaaagagcgtgtaaaaggacttatcatcaacaaattccgtggagataagacgatattagatcccggtgttgtgatgctagaggaacgcggtcaggtgccggtcgttggcgtagtcccgtatatggagctttcgattgatgatgaggacagcttaagcagcagattggaacagaaagaggaagggatcattgatatcgcggtgatccgttatccaagaatctccaattttactgatctgtctgttttcgagcagatggagcacgtatcggtgcgttatgtggaacatgcaaaagaactgcatcatccggacatgatcgtgcttccgggaagcaagaatacaatggcagatttaaagtggatgcgcgagaatggtttagaaaccctgatcaaaaagaaatcggaagatacggtcatatttggaatctgcggtggctatcagatgttaggagcgcagatcagtgatccgtgtcaggtggaagcaggcggaagcatgaagggcatggagctgcttccggtcgtgacagaattaaagcaggaaaaaacaagaacacaggtgacaggcatatttggtaacatatcgggtgtgctggcaggactttccgggaagtctgtgcgtgggtatgagatccatatgggaagcacgaagaagctgacggatacggatgaggcagattgtgtaaaagataatttcctgacaaaaattacagatgtagtacatgagaacgcagaaaaacaggatggtgcatattccggaaatgtgtatggaacgtatgtgcatggcatttttgacgaaggaaatattgcagggatgctggttcagattctggcagaaaaaaaaggtgttgtgttagatactgcacagatgatgagttaccagcagtttaagcagatgcagtatgataaactggcagacggactgcggaaatccatggatatggatgcaatttatgcgatgttaaaagagagtagatagatatagaaggaaacagatgaaatttgaaatagatttaccggatcagaacatagagcgccgggtaaagcaaaattgggaccgggttgcaaaaccgttggacggactgggcgcatttgaaggaatcatcgcaaggataggagcgattcttggaaccgaggacattgatattacaaaaaaagcggtgatcgtcatgtgtgcggacaatggaatcgtcgcagaaggtgtcagccagtccgggcaggaggttactgcggcggtgacagagaatcttggaaaaaacaacacttcggtctgcaaaatggcaaaagccgccggggcagatataattccggtagacattggggtaaatacggacaaaattttttcgggagtgaccaataaaaaaataagaaaaggaaccaatgatttccttatcgaaccggcaatgtccgggcaggaggcattgcaggcgatacaaacaggcatggaacttgtaaaagagtgcaaagatgcaggctatacgctgcttggcacaggggaaatgggaattggcaatacgacgacaagcgcggcgatggtagcagcgctgcttgatgtttcacctgagaccgtttcaggtcgtggcgcaggactaagcgatgcaggacttgtaaaaaaaagacaggtgattgcagaagcattaaaaaaataccagcttaaatcgacagaaccgatgcagattttatgttcggtgggaggactggatatcgccggactttgcggcgtatttttaggcggagcaaaatatcatattccaatcgtcatagacggcgtgatcagcgcggtggcggcactgacagccgagcggctttctccgggaacaaaggaatacatgattccttcccacagaggcaaagagccggcatccgaattattgatgaaagaacttggacttcatccggtgatcgatgctggacttgcattaggtgagggaaccggagcagtcatgatgttttcactactggatatggcgatgacattatatgagacaggcgctaccttcggtgattttcacatagaggagtaccatagattttagagaggtttacaatggttacattggtgacaggtggaagtggcagtggaaaatctgcttacgcggaaacactgctgtcttcctgcgaaggaatgaaattttatattgcgaccatgcaggtttatgatgcggaaggcgaaaagaaagtagagcgccaccgaaaactgcgagcgggaaaagggtttcttacgattgaaagtccggttgatgtcggaaaaattgaggtatcagaatatcagtcgcagataggaaagatgaggacggatgctgctggtaaaaaatctgcgttgttagagtgcatgtcgaatcttgcagcaaatgagatgtttacaggtgacggcgtaagatcagcagatcaggtgactgataaaatcataaatgacatacagtttcttacacagaaaacagacaacctcatcatcgtgaccaacaatgtgtttgaggacggtgtaaaatatgatgacggaacaatggaatacttaagagcacttggtaaaatcaacgtggggcttacggaacttgcagaccgggtggtagaagtggttgtcgggattccggttgagttgaaaatatagtgaggataagtcatgaaaatattaaaggcaatggtgatcgcattttctatttattcgaaaattccggtgccacaatttgaatggaaggaagaagacatggaatacatgatgtgtttttttccatggatcggtggtgtgatcggactggcattttttggctgggcggtgttgtgtgaaaaatttgcggtaggaacgctgtgttacgcgctgatcgcagcagcaatcccgttgatcatctcaggcggatttcacgtggatggttatatggacacgatggatgcacttcattcgtatcagagcagggagaaaaaattagagattctgaaagattcccatatcggcgcatttgcagcgattatgctggtgctttactatctgatcgatattgcggcgatttctgagatccatacccgaaaagcagtgtttgcagtggcggcagtttttttcctggcgaggtgcttaagcggaatcgcagttgtgacgttgcagccggcaaaaaaagagggacttctctatacctttgcatctggggcacaaaaagaaaaagttaaaagaggattatatttacaacttatcttatgcatggctcttatgatcatcatttcaaaagaatatggtgtggcagcgatcattgcgtcacttttgagtttcctttattttaaaaagaaaagctataaagaatttggcgggatcacgggtgacacagccggattttttgtgacggtatgcgaggctgccgcggcagttgcagttgcgattgcaggcgcgtagcgcaacttaaaatgaaaaaggaagaacaaaaatatggaactatacatcggtggatatgcgcaggggaaactttcctacgtgcagaataaatacaaagggaaggatgttacaatcgtcaatgatctgcatttgtgggtgaaacaactgatacaggagggaaagccggcagaggagattgtgctgcaatactataaagaacatccggactgcatttttatctgtgatgagattggcaatggaattgttccgatagaaaaagaggaacgcgaatatagggagcgtaccggcaggttattgatccagcttgccagagaggcaaagacagtggagcgtattgtatgtggaatcggacagacgataaagtaaatgtaaaaattacgtggattcggcacggaatgacgaaagcgaatgaagaacaccgttatcttggaaaaacagatgagccgttgtcggaaaaaggaatccacctgttagaagaaaaaaagagagaatacaatctggataattccggttttttatatacatctccgatgaagcgctgtgtgcagacagcagaaatccttttttcgcagaagccgatagtgattccttcgtggaaagaaatggattttgggttgtttgaaggaaaaaattacgaggacttaagggacaacgcagattaccagaagtggattgacagcaacggaacactgccttttccgggtggtgaatcgagagaaagttttatcaggcgttccatggaaggttttgaagaaatgctggcggatgttttaaggcatgtttccggggatacatctggagccgaatggcagatagaaatgcctgatacacaggattgtgatgcgatagaggtttcggttgcagcagtagttcatggtggtacgatcatggctgttttaagcacgctgaccggaggagaatattttgatttccagttgaaaaatggagaaagttatgagactgtcattcagttagaaaaagggagtaagcatttatgatttatcatatcactgccacactggcaggatttttattagatttactgttgggagatccatactggctgccacacccgatccggctgattggaaactggatcagttttctggaaaaaaagctgatcggcggcaaagaggaagaaaaacatacaacaccagaacaggagaaggtaagaggcgtggtgcttgtgctggctgttttaagctgtaccgtggcagttgcggcaattatactggttggagcatacagactgaatccgcatcttggcgttattgttgaaacaattatgacgtatcagattcttgctacaaagtgtctgaaagtcgagagcatgaaagtatataaggaattagaaaagggcgatatcgaagcttcgcgcaaagcggtttccatgatcgtcggcagggatacggaacatctcgacgagacaggtgttgcaaaagctgcgatcgaaacagtggcggaaaatacgtccgacggtgtgatcgcaccaatgatttacaccgcgatcggtggtccggttctcggtttcttttataaggcggtcaatacaatggattcaatggttggatacaaaaatgaccgttatctgtatttcggaagaaccgcagcaaaattagatgacatcgtaaattatatcccagcccgcatcagcgcagtgcttatggtaatttcctgttttttctgtggaaaagagtttcatgcaaaacaggcatgggatatttataaaagagaccgctacaaacatgccagcccgaactcggcacagacagaagcggtgtgtgcaggtgcacttggaataagacttgccggaaatgcaagctattttggaaaagtcgttgaaaagccttacattggagatgccacaagagcggtggaggccgaggacattaagcgcgcaaaccacttgctatatgcgactgcgatcttgtgcgaggcgctgtgtctgatcgtgcttgtggggattgcttagaagaatggaggaaacagaaaatgcgcccggtcatacatggaggagacatctatcagaataacgtagaactggatttttcggtcaacatcaatccgctcggaatcccggaaaaagtgaaagaagaaatgcataaggcgatagattcctgcgagcattatccggatatcagccacacaaaactgatcgctaaaatcgcagaaaaatacaagattcccgcggagcatattttatgcggaaatggggcgtcggaactatttgcagcaattgttcatgccgtaagaccatgcaaaatcataattccgattccttcatttttcggttatgagagggcggcaggtgtgacagatactatagtttcctattatgagatgaaagagtcggacaacttctgcctgactgaaaattttttgcaggaattgcaggaggatgtcgatttgctgtttctggcgaatccaaacaatccggttggaaatacaattgaggagtctctgctggagcaaatctgtgaccgatgtaaagaaaaacagatcacggttgtgctggatgaatgttttttagaatttacggagaaaaaaggctttttttccacacacaatctgcatgattatccgaatgtcatcgttgtgaaagcttttacaaagttatatgcgattccgggggtgcgtcttggattctcattctgtggcggaaaagaacagacagatcgtatttccctgcagctgccggagtggaatatttctgtgatcgcagaagcagcaggactggcagctttggaggaaaaagaatattgcgacgagacggtttcctatatccggacagagcgagaatatctggcaaaagaactggaaaatgcagccattcaggtttttccgggcgaagcggatttccttcttttaaaaacaaagcagccgctgtatgacagattattagagcaaaaaattttaattcgtgactgcagtaattacaggggactgcaaactggttattaccgggttgcagtaaagcagcatgaggacaatgagaagctgatcgtagccataaaaaatgggtggcaggattcacaggacagcgaatggaaaaaagtagatttgtaggacagcgaatgaaagagtagaagatttgcaggggagctaatgaaggtgtagcgaaatttacaagacagataatgaaggagcaggagtgtcacatggaaacgattgagtatgtcagaccacaggaaatcgaaaaacgaagctttgcaatcataacaaaagaattggaagaaatgggaatcgtgcttccgaaagagcaggagcttgtgacgaagagagccattcatacaagtgcagattttgattatgcaaagacgatgacgtattcgccagatgcggtagcggtggcaaaaagcctgatcaaaagaggggcggacattgtcacagataccaatatggcgctttcgggcgtgaataaaaaggaactggcaaagtacggcggagaggcgcactgttttatggcagatgaggaagtggcaaaaatcgcaaaggagcgcggtgtgacaagagccaccgtgagcatggaaaaggcatcacagatccaaaagcctgtaatttttgcaatcgggaatgcaccgacagcgttgatcgaactctaccagatgatacagagtggaagttaccgcccggcttttattatcggggttccggttggatttgtgaatgtggaagcagcaaaagaactgatcttaaagaccgatataccatatatcataaaccggggcagaaagggcggcagcaatgtcgcggcagcaatctgcaatgcacttttgtatgaactgcgcgacgagacgtaaaagtcaggacggatggatgcagatttttggattaacagataaatctgagagagcagaaggagcattggaaaattatgcgatacggatttacaacaggaagctgtgcagcggctgcctcgaaagcagcagcctatatgcttttaacaggaaaattaaaacaggatattacaattcagacaccaaagggaatcgtttttcatgcagaaatccttgaaatcacaagaggggaaaaagaggtgacctgtgcggtgcgaaaagatggtggcgacgatccggatattacaaccggggcgttgattttttccaccgtgcgcatcggaaatcaaatcaaaaaatctgttacagaaagtgtcggggcgttagaacagaagaaagcagaaattctgatcgatggtggaacaggtgtaggaagggtgacaaaacccggtttagaccagccggtcggaaatgctgcaatcaatcacgtgccgcgggaaatgatcgcaaaagaagtgcaggaagtctgtgcattagcagactataccggaacgcttgagattatcatttccgtgccaacgggagaaaaacttgcggagcagaccttcaatccaagacttggcattgtcggaggaatctccattttaggaacatccgggattgtcgagccgatgagcagtcaggcattgttagatacgatcaaagtggaattaaatcagaaaaaggcggaggggtatccggtcgcggcggtatctccgggcaactatggacttgattttatgaaaaatacctaccactatgatcttgaccgcagcgtaaagtgcagcaactttatcggtgatacaatcgatatggcgattgccgctggatttgaaaaaatgctgctcacaggacatatcggaaaactcgtaaaagtagcaggtgggattatgaacacacattccaaagagggggattgccgcatggaactgcttgtggcagcaggagtgagaaatcaggttccttatccggtgttagatgagatactgcagtgtgtgacaacagaggaggcagtcagaaaactggaagcctgtggcaaaaaagatgcagttatgcaggacttacttgcaaaaatcatgttctacctgaaaaagcgtgcagccggaaaaatgcaggtcgaagtgatcctttactccaatgagtttggagagcttgcaaaatccgagggcgctgaggcgtttttacaagaattattataataaaatataggtaattgcgaaacttatagacggggcagagcgaattacctaaacgaaaggaacaaaaacagtatggtatattttgtgggagcaggaccgggagcagccgatctgatcacagtccgtggaatgaaacttttgcagcaggcagatgttgtcatttatgcaggatcacttgtgaatcccgaacttttgacttattgcaaaaaacaatgtgagatacataacagtgcgtacatgaccctagagcaggtgcttgcggtaatggaggaggcagaaaaaaagggatttatgacggtgcgcctccataccggggagccgagcatttacggagctgtgcgggagcagatggattttctggagaaaaaggggattgcgtatgagagttgtccgggcgtgagcgcctgctttggagcagctgcatccttaaatctggaatacacgctgccggaagtatcacagtcactgatcatcacccgcatggagggcagaaccggtgtcccggaaaaagagagcattgaaagctttgcagcacatcaggcatctatggcaatctacttaagcaccggaatgttaggagaactaagcagacggctgatcgcagggggctatcgggcggatacgccggcagcgcttgtatataaggcaacctggccggaggaggaagcatatctttgtactgttgcgcagttagaggagacagcaaaagcgcatcagatcacaaagacagcactcattatcgtgggggatgttgtggcacaccagcactatgcaaaatccagactttatgcagcagattttgaaacagagtttcgtaaggtagaaaaaaatgaacattagtatcatcacatttacagataaaggcgcagaactggcagaaagaatcagccagagctgggaaaatgctaagatcacgatcgaaaaccgccaccaaaagactaatgagaaacaaggcagtcagtcacctgcggaagcaaggcaaagtcttagtgactggaccagacagcagtttgcagaaaaaaacgcgattgtcgtgatcggtgcctgtgggattgcagttcgtatgatcgcaccgttcgtgtcggataaattaagtgacagcccggtcgtttcattagatgaagcaggaaccttcgtaatcccgctgctttccgggcatatgggcggagccaatgagcttgcagaacagattgcagagcagatcggcgcaatcccggtcatcacaaccgctacagatgtcaatcagacctttgcggtggatgtatttgcaaaaaaatgcgggctttccatttataaccgggacggaatcgcaaaagtttccacaaaagttctggaaggcaaaatggcggacattgtgatttcgtcacaacatacggagttagagcagggaatcctgggcttgcagccaaaagagtatgtgatcggaatcggatgcagaaaaggaaaaggctttgaggagctggattggtttatccagaagtggttagctcatgcaaaagttgaaaaaaaactgatccgtgcaatggcatccattgatttaaaaaaagaggaggaaggactgctccggtggtgtgctgcaaaccgtattccgtttcagacttatccggcagagacactgcggcaggtgaagggcgatttttcggaatcctcttttgtaaaagaaaaaacaggtgtggataatgtctgcgagcgtgccgccatgaaagcagccggggagagcggaacattcgtgttaaggaaagtcgcagaaaatggcatgactattgcgattgtaaaatatgactggaagttagagagagaactatcaaaggagtatcggatcgatgaaaagtaaaatatatatcgttggaatgggaccgggaacagcggaaatgctgacaccacaggcagatcacgccttacaggacagtgatgtgatcgtcggttatccggtgtatctgaaattattaggagaaaaatatcaggaaaaagaatttttatcgactccgatgaaacaggagatcagacgctgcgagatgtgttttgaggaagcagaaaaaggaaaaacggtctcaatggtatgcagcggtgacgccggtgtatatggtatggcttccctgctttatgagatgtcagaaacgcatccggactgtgaacttgtggtggttgccgggatcacagcggcaaacagcggggcagccgtgcttggcgctccgttaaatcacgactactgtgtgatcagcctgagtgatcttatgactccgtgggagctgatagagaaaaggattgcggcagcagcctgcggcgatttttgcatggcaatctacaatccgtcgagccgccagagaccggattatttaaaaaaagcctgcgatattttattaaaaaatggcgtagaaccggagagagcctgtggttacgtggagaacatcggaagagaaaacgaaacgtatgagacctgcacattagaagcattgcgggaacgtcaggtcaatatgtttacaaccgtgtttattggaaattcgagaacgaagattataaatggtaagctggtaacaccgagaggatacagcgtgtcgtaaaggataaaaagcatagtggaaggatttttctatggataaaattttgattttttcagggacaacggaaggacgtatgttagcgcagacattgtccgaaaacggaatcaactgtattgtttccgtggcaacagaatatggggagatcgtcatgccggaaatggaaggcgtgaccattcataaaggcagaatggacaccggggcaataaaggattttgtgtcacaggagcaatttgatgctgttgtggatgccacgcacccatttgcgatggctgtctcggaaaatatcagggatagtctgaaaggaacagacattccttacattcgtttacagcgacagacttcggagatgatgaaaaaatgcaaaacaggaaatcctgagacagaaaatcaaaaagaagtgaatcatgcagcagatgtgatcgtatgcaaggatgcagcagaatgtgcagacatattaaaaaacatcagtggcaacatccttcttacgaccggaagcaaagacctgtccgtttacgccggagaagaaaatttaaaaaacagattatttgtccgggtgctgccgggaatcgaaagtatttcaatctgtgagcagaacggcatttttgcaaaacagatcatcgccatgcagggaccattttccgtggaaatgaaccgtgctctcataagacagttcaacatccgttgtctggtgacaaaagagagtggcagaactggtggatttctggaaaaaataaaggcagcccagtcagaaggaatcacagcctgtgtgatcggaaacccggaaaaacaacataccggagattcctatgaggaggtatgcagaaaaatttcctctatcaccggaataacgatcaaaaaccagatttcgctgatcggaattggcatgggagcgagaaagtcccttacgatagaggcagcagaaaaaatccgagaggcagattatatttttggcgctaaaagactgcttgagaccgcagagaatgatcatgcggtgcgttatccctattatctggcagaggagattttgccggaattggaaaaattatccggctgtggtgtgaaagtggcagttcttttttccggcgataccggattttacagtggatgcagcaaattatacgaaaaactgaaagacagaagtgacagtcaggtgcgcatttatccgggcatttcgtcggtcgcatactttgcggcaatgacaggatacagttatcaggacgcggctgtttttagtattcacgggcacggcgaagacagaacgtggacggggaaactgcttgagacaatccggttttccgaaaaaacgttcctgttgatgtcaggaaaagaagatgtgcagaaattaggcagtctgcttttaaaatatggattacaggactgcgcagtgctggctggttttcagttatcctatccggaggagaaaatcctttttttgtcaccaaaacaatgcacgcaggtggaagaaaaaggtttatacatctgtctgattctgaatcagaatgtggagaaagaatctgttacctgcggtatcccggatgcagaatttttgcgggacaaagtaccgatgaccaaagaggaaatcaggggattgtctatctgtaaactgaatctgaaacgggattcggtctgctatgatatcggaagcggaaccggttcgatcgcagtggaaatggcaaaaagaagcggtgagatacaggtctatgcgattgagaaaaagccgcttgcattagaactgatgcaaaaaaacatcgaaaaattcgcactctccaatatccaaatcatcaaaggggaggcaccggactgtctttttgcagcggatcgaacagaacgaccgacacatgcatttatcgggggaagtggcggcagactccgggaaatcttagacactttatataagaaaaataacatcatgcgagttgtgatcaatgcgatcagcttggaaacagtaggtgagctgactgcactaaaaaatgacaggagaatcacaaatcttgagatcatacaggtgcaggtatcacgcgcaaagcagatcggagaatacaatctcatgcagggggaaaatccaatctatatctgctcgtttgattttatgagaatatagaaagaaaaggacaatagcatgaaatttccaaaaattatgatcgcagcgacaaaaagcggcagcggaaaaacaacgatcacctgtgctttcttaaaacagctgttaagcagaggcagacatccggtgtcttttaaatgtggaccggattatatcgatcccatgtttcatgaaaaggttcttaaaattccgtccaaaaatctggatacatttttttcagatgcaaagcaggtaagagctttatatgcaatggaacagcccggacatgatattgcagtactcgaaggtgtgatgggattatatgatggacttggtggcatccgtgaagagggatcttcctatcatctggcagaaacgttgggggtaccgatcgtacttgtggtggatgcacatggcatgggaaggtcggtgattccgcttatcgcaggttttttgcagtatgataagaaaaaactgatcaggggtgttattttaaacaggacaagtaaaatgttttttgacacgatcgcaccactgatcgaggaagaactttcgattaaagcattgggatgtattccgaatgaaaaagaactgtcactcggttcaagacatctcggtcttattttgccggatgaggtaaatgaactcaatcttcaattggaaaaggcaggacagctgctcgaaaaatacgtggatgtaaatgccatgattcaaattgcggagcagggcatcaagaaagatttttataaacaggagattttgtatccaaaaacgaaatactctgcaccaaatagtcaggagaaaatcacagagcaaagtctggaacagattgcttacggacacagaaaatctgctatatccaaaaaagtccgcattgcagtggcacaggatgaagccttttgtttttactaccgggataacctgaaaatgttagagtattacggtgcagaacttgttcccttttcaccgctacatgatacagaactccctgaaaatatacagggtttactgttaggtggaggctatccggaactttatgcaaaagaactttcagaaaatgagagtatgcgaagatcaatcaaagcagcattggagaagaagctcccctcattggcagagtgtggaggttttatgtatctgcatgagaagctgattgataaggagggaaacagtttttcgatggttggagcaattccggcagaatgtcatgatactggaaaactggtacggtttggttatgtggagcttacagttgcaaacaggaacgagggagccggggataatgagaaaacttccgaagcgacagaaattgcaggcttcttgcagaaaaatgataaaatctgcgcacatgagtttcattattttgacagtaccgataatggggcagcctgtacggcaacgaaacctgtaactggaagaaactggaaatgtatacatgcatcgcaggagcatttctggggatttccacatctgtattatccgtcggatcctgaatttgtagttcggtttatagagaggatgattcgatgtcgttgaaatttgaatacaggttgtatcatagagatacaaacagaagcagaatattcattgcaaaataagatagtctgtgctaacataagtaaggcttcggaaagcacggtgataccgtttcatacgaagcacagaataatacagtttcatagggaagacagttggtgccagccggttctttaagatgtaacgatttgttacaatgaaccagactggttaaaagggaaacaggtgtgaatcctgtacgatctcgtcactgtgataagggagtatggcttcaattccatttgaaaagtcactggtgcaaggcactgggaaggcagaagcaatatgacgatctttcagccaggaaacctgccaagcgtctggtacagggaacataattcccagatcacgagtaattggtcgtactgtttagcaggcttaaagaagccttgtttttcgttgactttttactccgttcagaatatctgaccggagttttttctttgtgtacagatctctatgaagcaaaaatcacaaagaggagaaaaaaatgaagaaaaaaacacttgcacttgttcttgcatgtacaatgacagcaagcctttttacaggatgcggaagtaagaacgagacagagacaacacagccacagacagaggcagcagcagaaacagaagccacagaggtggatgatcaggcggcagcagatgaagttgcagcattgatcgatgcaatttatgtgcagacaagaaatgagaacacagacgagcagtgtgcagcagcaaaagaagcatgggataacctgacagatgcacagaaagctttggtagaaggagaaaatgcagatccggattatttcggaagagataccggagatgcctccaaagacgatccactgaatgaagatggcatcggagaaaatgaacttttagttgtaagttttggtacttcttttaatgacagccgtgcagaagatatcggcggcgtagaaaaagcattagaggaagcttatccggactggtctgtaagacgtgcatttaccgcacagatcatcatcaaccatgtgcaggcaagagatggtgaaaaaattgacaatgttgagcaggcacttgacagagcagtggcaaacggagtgaaaaatcttgtcgtacagccgactcatttaatgcatggcgcagagtatgatgaacttgtggaagcattagatgcgtacaaagacaaatttgaaacagttacagtagcggaaccattattaggtgaagttggaagtgacgcagctgtcattaatgacgataaagcagcagtagcagaagctatcacaacagaagcagtaaaaacagcaggatttgattccttagatgctgcaaaagaagatggaacagcatttgtgttcatgggacatggtacttcccacactgcaaaagtaagctacagccagatggctacccagatggaaaaattaggatatgacaacgtatttatcggaacagtagaaggtgaaccggaagaaacagcctgcgagaatgtgatcaatgatgtaaaagaagcaggatacacaaaggtgatcctccgtccattaatggttgtagccggagatcatgccaacaacgatatggcaggggatgatgaagactcctggaagagccagtttgaagcaagtggcgcttttgatacggtagactgccagatcgcaggacttggtggaattgaagcaatcgagcagatttatgttgcacatacaaaggcagcaatcgattctcttggagatattgtcacaacatcagcagataacagcgatgttcttgcagacggaacctattctgcaaaatttgacacagacagcagcatgtttcatgtgaatgaagcttatgacggacgcggaactttaactgtaaaaaacggaaaaatgacacttcacatcgtgatgccatcccagaacatcgtaaatcttttcttaggatctgccgaagaagctcagaaagacggagcggaattaattcagccaacaacagagaaagttacatattctgacggaacaacagaggaagtatatgcttttgatgtaccggtagaggcattagataaagagtttgaccttgcactgatcggaacaaaaggaacctggtatgaccataaagtttctgtttcagacgcaaaggctgaataatgatcagaaaagaaaattcaggacatgtaaaagtgaataagtaaaaaataaacgcacagattgttaagagaacacgatttgtgcgtttatttttgtgtgtggcgaatctatgattctgtgttataataagctcgttctaacgtttttaaagataagaaacagaacatgttataaacagaagaaaagaggtcataaaatgaaaaaagtaggtgtaagtaaagaggaaaaacaattatcttattataagtttttcgagcgtgatttagcagaagtaccacaggagaaacttgatattttaaataaaggtgcatctaagattccagcagttccatttgaaaaaagaaatctgtatcttgcaggtgcagatgaggaatattgtcaggttggatatggagttatggaggacggaacagcatttgtatgtaatacaacctatatgcctggggtaacagttgagatgcttgactggtggttcccgtggcatagtgtaggttctgatttgagatataaaatatgggatccggaagaccattactttgccagagcagaccgtgcagattatgtatgtgatccggcagttccgatgaaccagaaaacatggggagtcagtcactacatattagaaaatgcaggaatgggaccagactttttgaaattaaattttaagagaccggcggattttggcttcgacgaatcgttgattggaacagaaaaatgtacttcgttagtgtgcgctatcggagagggcaattgtgcagcagcgatgacacacaaatggtatccatacgaagacggaatggtattctgttcccgtttctggattggaatgggagttgtagatggaaaaattgtaaagacactgccagaaggagtccgtattccagaagttgttccacagggcttatttggacataatattaaagaatttacaaatcttgcggcaattttacctgaattatatgaggaaaataaaggggaactataaaatatttatacccggaacttatgcaacgcagtgcagaaaatattttggagatatgtcgatcgagggtgtggagattgatgagaaaatcacagatatttcccggaaatatttttccctgccggatgatgtgaacatgaatatgcgtggcagtggggaaggaaacatcaaccagtatctttctgacacgatcgcatctgtgtttggaactgtttataccgcagatgtgaaaggctctacgaaccgggaactttttgcttccgataacgcagaaatgctggatacattaaaaaacaatgcaggtgatccaagaggaagttgcctattataaaggaatttacgagacagaaggcgtagacagactgttggagagtctgtagataattagtgattagaaggggattctataagaaatagaagactggtgttgaataatttaaaataaaagtggaaagaggcacagcagaaattcctgtgtcttttttcatgtttcactattccaccagagtatagtataattccgaataattattgtacatatattagttaaatagataaaatacagacatgaacaagagacattaaatggagacaaataccagtattcagcaaatgcagggcttgacgatattgtaaaagctctggaatggattcatgaaaatattgaacagtttggtggagatccggagaatgtgacagtgttcggtcagtccggtggtggtgcgaaagagttagctcttatgacaactccgaatgccaaaggtttatttgagcgtggtattgtgcagagtggagcaaccgagacaatgggtgttacattcacaagcaaagaagcaagccaaagagctgatgaaattgttggaaggttactctgttggggagtagagaaaagaaaaatgtgagtaaaaatagaaggagttgccgaaaggtgactccttttttgaatgttgaggtgagttagaattaaacaaatttgacattccaaaaagaaatagttataattcgaactgtttgaattataactattttttttggagggagataatgatatggacgaatcgttgcattatctgatcatggcaaatcagatgttagtgcagaaatcgttgatggagcgattgaaaaatacaggtctaaccattggacagcccaaggtgttagattacttaaaagaccatgacggcagcagccagaaagaaattgccaaaaactgttttttagaggctggttctctgacttccattttaaaccgtatggaagaaaaaggtctgattgaaagacggattttaaacggaaaccgaagaacgtttcatatctttctgacagaaacagggaaagaaagacaaaaaacaattaatgacgcctttttggaaattgagaaacaggcattgcttggaatttcagaagaagaatatcaggcgttcatgacggtttacggaaaaatctatgagaacctgaaacagacagaaaatgagtagatgagtcaatctgaaaacgacagaaaagaaaatatagtagaaaaggaattaagaaaatgaacaagttaaaacgttatcttttatttttagtgggattatttgtgaatgcgttaggagtcagtctggtgacaaaggcaagccttggaacatcgccgatttcctccattccgtatgtacttagcttaaactttccgtttacgcttggaaactttacgatatttttcagtattttactgatcattctgcagatcataattttgcggaaaaatttcaaaattgccaatattttgcagattccggtatccattgcctttggttatttcattgacctgacaatgtatctgtttttccgggtaaatccgcagaactattttgtaaaaataattgcacttctggcaggctgcgctgtgctcggatttggtgtgtatttagaagtagttgcagatgttgtcatgcttccgggagaatcctttgtgcgcgcgatcgtgcagacatggaacacgaactttggaacaacaaaaatcatttttgatacttccatggcagtcattgcagcagtcctttcctttgttttttcaggaaaattaaatggtgttcgtgaaggtactcttattgcagcattgttagttggttttattgcgagacttcttgggaagaaattagagtttgtaaaacctcttttgttcccggaggaatacaaagaaagttttgaacagtcaaaaccagagaaaaccgaagcagcttatcagaaaaatattatcgtcatcggaagacagtatggaagcggcggacatgatattggaaaaatgctggcagagaaacttggctttgatttttatgatcaggaaatcatcaaaatggctgctggaacgaccgggctgacttcagattttattagtaaaaacgaagaatccatgacaaatagtttcttatatgatctggtgaatcaggtttatatttacagcaaatctgaggaggaagctccaaaagacaagatttttgaagcggagtcgaaagtaataaaagaactcgcagaaaaaggcaactgtgtgatcgtcggaagatgttctgattatattttaagagaccatgcaaatgttttaaaaatatttttctcggcaccgatggaaagcagagaaaaacgtgtcatgggacgtttgaatgtatctgaaaaagaagccgaacgtaaaatccgcagagaggataaacttcgttcggataattatcattattatactggaagaatgtggggtgcagcagcgaattttgaccttacactgaacacggatttaggagaagattacatagaaaaatgtgttatgggagctttgaatcagtaagcgatattttatgttctgttggtaacaggtgaagcaatttttaaaacataaaaaacagacttataatcgaacgtattttctggtatactgaagataagaatttgatattctggttcttaaggatatcgacctggaaaaagagaaagtgcaggaggtacgttcatgaacgaaaatgagaatcctatctatatcgcaattgatctaaagtcgttctatgcctccgtggagtgcagcgagagaaaacttgatccacttacgacaaatctggttgtggcggatgccgggcggacagagaaaacaatctgtctggcggtttcaccgtctttgaaagcgtacgggattccgggaagagcaaggctttttgaagtcgtgcagcgcgtgaaggaagtgaaccgggagagattgcaaaaggcaccgggaagaacttttgagggaagttcttatttttccgatgagctgaacgaacacccggaactttcgctcacttatgtgacagcaccgccgcgaatggcgctttatatgaaatacagcacaagaatttatgatatttatttgaaatatatcgcaccggaagatatgcatgtctattccattgacgaggtttttatggatgtgacacattatctgaaaacgtatcatatgactgcaaaagaacttgcggaaaagatgatgcaggatgttttggaacagactggaattacagccacagcaggaatcggaacgaatctttatctgtgtaaggtggcaatggatattgtggcgaagcatgttacaccggatgcaaatggagtgcgtatcgcagaattagatgagatgacttaccggaaactgctgtgggatcacaaaccgctgaccgatttctggcgggtaggacatggttatcggaaaaagttggaggaggccggactttacacgatgggcgatattgcgcgctgttccattggtggtgggcgtgattattataacgaagagcttctttataaaatgtttggcatcaatgcggagcttctgatcgatcatgcctggggctatgagccggtcacgattgcggatattaaggaatataaaccggagacaaacagtatcggttccggtcaggtgctgcattgcccttatgattttgaaaagacaaagctgattgttcgtgagatgacggatgcactggtgttagaccttgtagagaaaagacttgtgacagaccagattgtacttgatattggttacgatattgaaaatctgacgaacccggacatccggaaaaagtatcatggcgaggtaaaagcagaccggtatggaagattcgttccgaagcacgcccacggaacagcaaatctggatacaaaaacatcttccactgcaaaaatcatggatgccgttttggatttatatgagcgcattgtggataagaatcttttagtgcggcgtgtctatgtcactgcaaaccgtgttgtggatgagcatacggtatcgaatcagacagagtttacacaaatggatttgtttaccgattatcaggcactggcagagaaacagaaggcagagcagacgagaatggaaaaagagcgcagactgcaggaggcaatgctttccgtgaagaaaaaatatggcaaaaatgcgatgttaaaaggaactaatctgcaggaaggtgcaactacgatagacagaaataatcagattggcggacaccgcgcctgaattttttgaaagtagtttttgtatagaagcaggcagaatttcgaacaagacagtgatccatgcattcagaggcacattttttgtatgaaagaggaaacggcagaccgtagagagtgaaggaaaggagaaagcggatgacggaaagcgaagaaaaatatggggatattctgaatttacctcatcatcagtcaaaagttcattcaaggatgtcgatttatgacagagcggcgcagttttctccatttgctgcattgaccggacatgaggctgcaatcaaagaaacagcgagactgacagaagaacaggtggaactggatgaagacaagcaggaagagctgaacgaaaaattacagacattgatagcgcatgcagcagaacatccgaaagtgtcagtaacttatttcaagccggatgacaaaaagaccggaggagaatatgtgactgtgacaggcacatttcagaaattccgtggctacgagaggacgattgtgctggaagacggaacgggcattgattgcgacaggatcgttgaaatcagggtgatttaaaaggaaatagaggcaagctttttttgcaagcaggggagagaatggctggcaggcaatcaagcggctatgctactttttatacagacatcacaaggtgctgccaatcattcttgtggatgaatatgacacaccattgctcgaagcgtatacgcaggggtattgggatgagatgatcgctgcctgcagacagatatttcataatgcatttaagaaaaatgattattacagccgcgcgattattaccggagtaacaagaatttctaaaaattcgttgttttcggatcttaataatctggaagtagatacagttacctgtgacgcatatgcagattgtttcgggtttacagagcaggaagtaatggatgcactgaaatgtcagaatatggatggcgatgagaacagtttgtggtcactgttattatcggttggttatattaaggctgaaaatgtggtgcataaagtggataccatcgaatgtgatgtgtcagttacgaataaagaagttatggcaatgtttcggacggagattcttggaatgcttcgtaatagagaggacggggcagatatgatattgcaatgtatccgttagagaagaatcaggatgcatttcttatggaatttaaggtttgggataagaagaaagaaaaaaatctggaggagacagtcgaaagagcgttccggcagatagaagaaaagaaatatgtgacagaccttgttgcagacggaatcgatgaagaacatatttataagcttggttttgcatttgcaggaaaagaagtacttgtgaaggagaaaaaacggtatgaagtataaacaggagttgagcaggcagcttgccttggattattgctgcaatgctgaagatattctggataacaagaatcactttaatgtatatgagcaaagggacggcagacgcagatttgaagaacaggatgattgcgttttgaaagttattgtagtgaatgagaaactgatttttacagggaaaaaagagatcgtgaacatttgcaaagaaaaatatgaaacttgttccggagtttggtttatggatgtggcacgttttagagaattggatacaattttgaaaccatatggttatcagttgaaaacagcgcatcctttctttttaccggagaaatctgaaaatagacgatcggatgggcagaaaagcgcttgtcaggatgctttgtcaggaaaagaaaaccgtgcatttgagataaaaaaatataatcatgatgagatacagcaatttaaaggcaatgagcagtttaatgaggcgttttgttttgatgaaaattcgccggatatgctggcagtagcagcaatttccaaaggaaaaatcattggtatggctggtgcaagcgcggacagtacaacattctggcagatcggaatcaacacagagaaagaggcggaaggcagaggaattgcctctctgttagtgaaaatattgaaagaggacattgaaaaattgggaaaagttccttactatggaaccagcatgtcaaatcttgcatcacagcgggttgctgcaaacgcaggatttaaacctgcgtgggtagaactgcttgcggagagaatatgattttggcaggaaaagaggaacacgaaaacggaagatgagattaatgcagagatgaaaaagtaaaagaaacagaggtttggaagaaaacatccgaacctctattattttgcaataaacagaacaccaagtgtaccaggaccgcagtgacttgacacgacaccaccggctctggtttctaatatctcatggaaaacaccgagactttccagatacgaacggacggattccacaattgcagcgtcacagccggaatgtgtgatgaatacgcggtcaggtctggcggactttaaatcactttccatatcttttacataggacatgataacagaattgatctttccacgatatttttttgtcgcatccatagcaccattttctactacaatttttggatgaagtttcaaaacaccgccggccatagcagcaacagcgttacaacgtccgccacggtacagataagtgagggtatccacgacaaagcttgctcttacatttggttttaaagtttctatgacggaagcaatttcagatgcagaatgtccgttttttgccagaatggcagcttccacaacgagaagtccgattccggtggagagatttgcggaatcaatcacagtaatcagattttctgcttctaattcatcggcagcaagacgcatgacattgccggatgttgacatactgtttgagatggaaaagcagacaatctcacgtccttcttccacataagggcgaaaaagttcaattgtttctgccagagacggggcggaagtttttggggttgtcttatgctcatcagaccatgtgtaaatctcatccggtgtaattgtttttccgtcttcaaattcctcatctccgagaagaatatgaagcgggagaatatcgatatcgtattgtgcagctaattctgctgagaggtcgcatgtgctgtctgaaattatttttaccatattaaaaaagtcctttctttgagatcattttcattgcgttttgtttgcagattttttctgcttcttcctgagtgaaatccatttggttcagtatttcaaaataagtatcgtagatttcttctggttttaagctgcggctgtctggataatcagttgcaaatactaatttgtttaaatcaaatgagcgcagtatctgattcgtttttgtaatatcatatttttttacgaggtctggcaaaatagcagatatattaaagtaggcgtccagtccatacaggtctttatattgaaatccgccgagatgtgcaatggaaactcgcaaattcggatattttttcatgacatttcggatacgggcaggagaacatacatcatctgaaatgtgagctcttgggtaagaatgtatttctactaaaatggcattttgatttgcccagtcaaaaatatgatcataatagagcccgtccaccgggtagccggtattggatgggtggatttttattcctaaacattctttctgttttgtaaccctgtctaactcataaattgttttatccatttcattccgtagatcaatgtctgcaaaataatatagtttatggtctgcatttccttctttgcacatggcggtcatattattgttcacagcttctacggtaaaatccattgacagcatatatggatcattgaaaggcatgagaaatgcagaatcgatatgatacttgtccataagttttaaataatcattcacactgccataatccacaaatttatcgttaaaaccctgatttgcttcaatgacatccggaggcattaaatgaatgtgtgcatctattttaggtattgttttccagttaaccattgttctgtattcccttcatattagtatctttgtaaaatttaagttaatcattttctttggaattttgatatcctatttcttcgcccagccaaaatagcagcatatgaatcaaaagaataacccaatcggctttcgaaaaatggtctgtgaatgagtgtataattccccaattaataaaatccaaaagactcattccaatgggatttattgaaattgtaagaagagatgccaggaaagccagcatgactcgtgttatccgcttagtttgtgaagaaataatggttgctcgcccgatttcaaatacgcatattccccatattaaaatcataacgaacactgccggcagaagcagaaaaaatagaaatggaaatataaaatatatgacatttaagatcaaaaacaggaaccagtatatggaaaagggaatcagatttactttcataatgttctcctcctgacataaatacagaaaattgcgaagcaacactttattctatagtaacataaaatattatgcacgacatacacaaaaatttaatttttcatgaaaaagttattaacgagtattgtctgtacaaattcccacatgaaattacaaaaaaaatagaataaacagtatataacagttgacaacagatatgcactgttatatactgtttgctgtaaagggagataagattgaaaattgagattttcaatctggaaattgtgctgacgcacaaagttccttgatttatgaaaagccgctgaagcggcagaatgagaggaaatatgcatattatcttaaatcattcctccatggtgccgatttatgaacagctcatggagcagataaaatcagatattatccagtctgaattaaaagaaggagaggcacttccgtctgtgaggacgctcgcaggggagcttcggatcagtgcgctgacggtcaagaaggcttacgataagctggaagaagagggatttgttacaaccgttcatggaaaaggaacgtatgtgtcagcttcggataaacagcttgcacttgaagcaaggcagaaagcgatagaagatgacttcgataaagtgatcgaccgggcgatttccatgggaatgagcaaggaggaaatatctgaggttgtaaaactgattctcgatgagaagtaaaatcggtaagaaacttttgaaatagatatgacacaatcatgaaatgcttgatgagatatttacttcagattgatgtaaaaagtcagacaacagaacataaaaaagaaaggcggaaattgtatgataacaatgcaaaatgtccggaaaacatatggaaactttacatttgaaatgtcaatggaactgccggaaggacagatactgggtttaatcgggaaaaacggagcaggaaaaagtaccgcaatcaaactgattcttggactctgccgggcagatgagggcagcatcagggtctttgatcatgagagtaaagaattgccggagacactcagacaggagatcggagtttctctggcagaatcaggattttccggggaactgaccgtaaatgatgtaaaacacattttaaaaaagatgtatcattcgtttgatgaaaactattttatacgacagggtgagaacttaaagcttccgatgaataagaaaatcaaagaattttcaaccggaatgaaagcgaaactccgcgtgctgacatctatgacacaccatgcaaagctgctgatcatggatgagccgacagctggactggatgtggaggcgagaaacgagattttagatatgttacgggcttatattgcagaggatgagagtcgaagtatacttattacatcccatatttccactgatttagaatccctatgtgatgaactttatctgattcatgatggaaaacttattttgcacgaagggacagatgcaatcttagagcagtatggtattttaaaggtgagtgaagaacaataccgcacgctggatcaaagctctattctaaaagtgcagaaagaaaattacggctatgcatgttttacggatgataagaagttttatcaggaaaattatccgcagatcgtagtggaaaacggaggaattgacgagctgattcttatgatgacaggagggtacagataatggcaggtttattggaaaaagatattcggttattatggggaacaaaacagacactggtaattttgtttgcaattgcagttgcagtcgcattttccggcaacggaaattttatcattggatatcttccgtttgtggtagagatgattgcaatcagcacgattgcgtatgacgagatggatcatggctatcagtttttattgacactgccgatcaataaaaaaacctatgtaagagaaaagtatctgctttgtgccggaggagtagtggcagcctgggtaattgcagtctgcctgtatctggtgtcaaaagtggtgcgtggtataccggttgttttggcagaagatatgctgacagccgcagtgattttgctaatcattcttttgatcagttttttcatgattccggcgcagattaagtttggctgtgaaaagagccggattttgacattaggaatgatgggagtaattgctgtgattgcatatctatgtgaggtcgtattcggaaaagagcggttgtatcaggcgctgaccgtgatagacaatatgaatgtggcagttctggctggtagcatcatcgggattacactgctggcactgttcatttcgtaccagatcagcaggcgtattatggaaaaaaaggagttttaacaggaattaacagatgattcttgcacccatttggaaaaaaagatatactcatagtatcaggctaaggggggcgagtagaatgggacagtttttaaataataaggaaccatatgataaatacaagaccgtaatgaatggaaccttttttgttgataagacagaaatattaaaagaattaattccagcattacagcaggaacagcgctttttctgcattacccgtccgcgacgtttcggaaaaacagttatggcaaatatgatagcagctttttttgaaaaaaatagtgaaaaatctttatttgagaagcttgcaatcgcacaatatgatcaatataaggagcaggctggctatcatgatgtgatatatattgattttagtgaaatgccaagagaatgtcatagttatgaggagtatattggcaggatacaggatggtcttgtcagagatattaatgaggcatatccagagattatgatagacaaaaatgaggcggtctgggatgtgctttctcaggtttttgacaaaacaggacataaattcatatttgtgatggatgaatgggacgcagttttccatatgtcttttgttacggaacgtgacagagaaaattatctgctttttctgaaacttttattgaaagggaaaagctatgtagaactggcatatatgaccggtgtacttccgattgcaaaatattcagatggttcagaactgaatatgtttttggaatacaatatggcaacaagagtacggtttagtgaatatttcggttttacagagggtgaagttgacagattgtaccagcgttatctggagcagacgaaaaatccacagattacacgtgaaaatctcagggaatggtatgatggatatcacactgcatcaggagaaagattatacaatccacgttcggtagtttgtgcattgacagataatcaattatcaaattattgggtaagttcaggaaaatatgactctattttcacatatatcagtcataacgtagatgaaatccagaacgatcttactttaatgtttgcaggagaaaaaataccaacagggatacaggaatatgctgcaacagcaccagaactaaagaccaaagaggagatatattctgcaatggtagtatatggtttgctgacgtatgataatggaaaagtatttataccaaataaggaacttttgggcagctatgcagcaatgatgaaaaaagaacaatcgttaggatatatttatcgtcttgccaacatatcatcacagatgctacaggcaacactagccaaagatacagagacaatgacaaaaatcattcagtatgctcataatacagaagtgccgattttgtcttataataatgagacagaactttcggcaattgtcaatcttgtttatttgtctgcaagagatcagtacagagttgaacgtgaggagaaggctggaaaaggatttgtagattttatattttatccggttctatatgatcaggattgtatcatactggaattaaaagtagatcattcaccggaagatgcaattgcacagattaaagaaaaagactatgctttgcggttcagaggaaaaacggcagaaaaaaataaatatacagggcgtatccttgcggttggaatcagttataacaaagaaacaaaagagcatgattgtaaagtggaagaaatataaaagtgaaagaaaaaaacatgaacagcttacagcgcaaattattcgaattacaggatttaaaatataaagattttcacagtaacctgatgccggggattgataaggagacgatcatcgggatacgcacaccggcactgcggaaatttgcgaaagaatttgcaaaaacggaagcagcagaggcatttttaaaggaacttccacatcagtattatgaggaaaataatcttcatatgatgttgatttcagatatcaaggactatgaatgttgtctggcagaagtgaaacgttttcttccatatattaataactgggcgacctgcgatattccaagaccaaagtgctttgcaaagaacaaaatagaacttcttcctgtgataaaagaatggattgcatccggggatacctatacaatccgctatggaatcggaacgctgatgagcttttatctggatgaggattttaaactggaatatatagaacttgtggcatctgtgcagtcggaagaatactatgtcaatatgatgattgcatggtatcttgcaacggcactggcaaaacagtgggatgcaacgatcccatatctggaagaacgaaagttatcaccgtgggtgcatagaaggacgatccagaaagcggtggagagctatcgcatcacagaggaacagaaagtttaccttaagagcctgcgggagtagcagttaccataaggttataagtggctaaaaatgcgagaagaagcgatgataaagttagaaacaaaagatttaatattaaaaaaaagcagagtttacggattggaagacaatttataagaatttatggaggaacatgtgaaaaaattacagccagaggaagaagaaaagaaatgggacaaactcttacagattcatacgaccggacgtgacgattccaattccgaccagtatcgttatccatacgagccgacaccgtacagtgtgttggagcgtcttgcaaattccgggctgcttcgaaaagaaaatacattgctggattacggctgtggaaagggcagagtcgattttttcctttcctatcagatacgctgccacacgatcggtgtggaatacaacgagcggatttatgagaaagcggtagaaaacagggaacacagtgctgcggcagggcggacagaatttgtacttgcagatgccgtgcagttttcggttccggcagaggtagaccgaatctacttttttaatccattttcgatagagatattaaagaaagttttggcgcgcgtgttggaatcctattatgagaatccgagggaattgcttttattcttttattatccttcggatgaatacatttcttatttaatgacagtagacgaacttatcttttccgatgaaatcgattgcagagatttgtttccgggggaaaataaaagagagcggattgtggtatttgaggtagaataactacagtgtgatttgcagttttcgatacagtcagtatccgtacagcaaatatggcgattgacatatccaaaaacaggtagtagtataaaattcgaatgagagggaatgaagttctcccttgggaaaccagaactgctgaaatatagctgatgacttctacgattatttgaaatgacagaatgaataaatgttttgtcatatagtcgcaggaggcatcagcttttttgcgtctatagaaaaagaaaaatggaggatttatgttagcatcattatcacttatttttattgtagggcttgcaatgggagccatttgccagaaactgaagctgccacggatcatcggaatactcgtcaccggaattgtgttgggaccgtatgtgctcgatttgcttgatccatccattttatcaatctccgctgagctgcggaagatggcactgattattattttattgaaagccggactttcactggatttaaaagatctgaaaaaagccgggcgttccgctgtattactgtcgtttgtacctgcagcgtttgaaattgcaggttatgtgctttgcgccccggcaatcttaggaatcacaagagtggaggcagccgtgatgggagctgtgctcggtgcggtatctccggcggtggtcgttccaagaatggtaactcttatggagaaaaaatatggcacagggaaagcaattccacagatgatcatggcgggcgcatcgtgtgacgatatttttgtgattgtattgtttacaacatttctaagtattgcgcagggcggtcatgccaatgtacttgattttgtaaatattccggtgtcaatcgtacttggtataattttaggcgcagtgacaggttatggactgtatcttttctttgagacggcatatgcgagaaaacactgcgtgcgtaacagtataaaagtaatcattgttcttggattttcctttttactggtatcagtggaaggatggctggaaggaaaaatttccttatcaggactgcttgcggtggtcgctatggcttgtgtgatcaaaatgaaaagccctgtatttgtgtcaaaaaggttgtcggaaaaattcggaaaactatggctggcagcggaagtcatgctttttgttttagtgggtgcagctgtggacatccgttataccttaagtgcgggactatcagcggttcttatgatttttgtggcactgcttttccgttccgtgggggtattgctctgtgtggcgggaacacgtctgacatggaaagagcggttattttgtgtgattgcttatctcccaaaggcaacggtgcaggcggcaattggttctgttcctttggcggcaggacttgcctgtggaaaaattgttctgtctgtcgctgtgctagcaatcattatcacggcaccgcttggggcaatcgggatggatgcagcctatcaaaggttgctggaaaaggaaaattaaaaaagatttttagaaagtattttggcggaaagtgtgttatattgatttcagataaaagaaaatgacaggggtatccggagatgatcagaaaagcaacagaagaagatttgtcgcgcatcgcagaaatttttgtatttaataacagaatcaattatttcccaatttttaagcaggaagagtattcatttggagaattgcaggttgtatccatgatagatcattatttcggaaaaggggaagttctggaaaatctgtatgtcgccgatgaatgtggaattgtgaaaggatttatggaaatccatggaacagaaatccgtaaattgtatgtcgatccatgctttcaaagtggtggaattggaaagaaattaatggagcatgcaatttcaacttttgatgttgatcatttgtgggcgttggagaaaaatacgagagcgattgcattttatcatcgtcacggatttatggaaaatggagaaaaagaattggaagaaggcacgacagagtatattataaaaatgataagggtggaaaaagaaaatgtacagttggacgagaaaccgatgcttcggaaaataatgagggaagatgtataagaggaaaagaaaagtggtaacagattactctgacgtaaagttagaaaccaaagatcttattttaaagaaagcggaatttgatgactggaaagcaatttatcataacctgtggagacacaaggaaagtgcaaagtatatgctctggtcactgacagagacagacgaagtcgcaaaagatcgaatgaaacgcacgattgcatttgaagaaaaaccggagaataagtatgcgttatttgtgtatttaaagaaaacgggtgaagcaatcggttttgcaggcatgcgcgaactggaacggggcatttatgaagagacaggtattgcacttggaccggaatttgtgcgaaaaggttatgggagacagatacttacggcacttcttgaggaggcaggaaaactgggagcaaaagaattccatgcctgcaaccggacgggcaatgccgcttccagagcgttacagttgtcatgtggatttgtattcgattcgttgtcagaagagaagacagatccaagaacaggcgaaacgtatgttttggagaaccatatttacaggtattagaaagaaggaagaaaatgtattttgaaagattaaatgaacagaatgtagagcagtatattgcctatttaaagcttgcggtgcagcaggagccggatatgatgacggtggacgagatagatgaggaaggaatcaggacaaggcttcgggattcattttatgaaaagtctacatcaattcttgcgatggaaaataatcaggtggtaggaagaattgagtatcatttttatgggtgtatgcaggatggatatcgcatggcgtatgtgaattgggtatatgttttacccgaataccggcatagtggcgttgcccggaggctttttgaagaatttgaaaaagactgtaaaaagcatgatatccatcaatattatctgatccgtgctaccaacgagaatgccgacagattttacaaaaaatttgaaggggtgcagttgggcgaggaaccgatgcttcggaaaatattaaaaggcaattgacaatggttatcattggttatatgatacatatataaccaatgataaccatttttatatagaaaggagccactatgtccacaaatccaacaaaacgaatcgaagagatcgaccggagactggaagaacttccaaagggaaccttgacctataagaagatcaatgggaaagaacagccgtatatccagcggacgattgacggaaaatcggtgagctattatgtgaaagtgtctgagcgggagcaggtgttcatggaatttgaggagcgcacaaagctgctggaagagaaaaagcacctgacggcttatgtggagggactgaaggacattcttaagcacaatccatatctctctgcccaggtggtgatcgggtatcaggattttgaagactttacctgtggacagcagttttatgtagataagacgcattttatcactgagtggctcagggaaggaacgaagatcacattgatcaccagaccgagaagattcggcaagacaacactgctcagtacagtaagaatgttttttgatccaagatatgcagaacatccggaatatttcagtaagctgcgggtatggcaggatgaaagaagccgtagtatgttcggaagtatcccggtaatctccacaagcttcggaggctgcaagggaattgattataagcagtctatccggggaatgatggggcaattaggaacaatgtatgggcatcatgaatatttactggatagtccaaaacttacagataaagacaaagagttatttgaaaaaacacgatggggacttgtttatcatgaaacatgttatatagaggatgcaataaggaatttatgtaaattactctataagcattttggggtaaatccaatcgtacttattgacgagtatgacacacctttgatcgaagcatacacggatggttactgggatgagatgatcacgacctgccgccagttattccataatacactgaaagaaaacgactatcttggcagagccattatcaccggagtgacgaaagtgtcgaagaattcacttttctctgacctgaacaatctgctggtcgccactgtgacagatgatatctacacggactgctgtggattcaccgagcaggaggtgatggatgcattaaagtgccagaatattgatgatatgaaaaaagtgaaggaaatgtacgatggattcattatcggtcatcagaaagatatttataatccgtggtctatcgtgaactatatgcatgatcggcagttgagatcttattggatccttaccagcagcaacaaactgatcggggatattatctgcagacatccatatgataaaaagtacgagattgaacagttaatgacaggaaaaccaatacacaaggtgatcaacgagaatattacattccagtatcttgacggagatgagaatagtctgtggtcacttctccttgcagtcggatatatcaaggcagagaacgtggtgaaagataacgaatggacagagtgtgatgtttccgtgaccaacaaagaggttatgtcaatgttccggacacagattgttgccatgttttcgaatggcaatattgcatatgagaattttacgagggcactaataaagcatagaacctgggatatgatcggtgtgatggaagatattgccgagtattccatgagttattttgataccgcaaagaataaaggaaagcatgctcctgagaatttttatcatggtcttgttttagggctgatcgtatccatgcgcaaagaataccgcatcgtatccaaccgggagagcggggatggacgttatgacattgcaatctatccttttgacaaaacaaaagatgcctatatccttgaatttaaagttttaaatgaacacagagaaaagactgttcaggaaacagcagagaatgccctgaaacagatccagatcagaaactatgaagcggatcttcttgcctatggcatccctgccgatcacatctataaactcggttttggatttctcggtaagaaagtctgggtagtctctgatccgcctgagaaagatgagaaggatcaggtcagatcagagtgggataacctgcggttccgataaaaaattgccgatgcaccagtaaggcgcatcggcaaaataaaaatcttatcatttaaaaacagatcatctttctcttagttatcagaagcatcatcatcagacatactgtaaacctgacgtttacgagccatttcatcattttcaagatattcgtcataagtagatactttgtcaacaaacgtaccatccggtaagaactcgataatacggtttgcggtagtctggactacctgatggtcacgggaagcaaaaagaatgacacccgggaacttgatcagaccattatttaaagcggtaatggattccatatccaaatggtctgtcggttcatcaaggattaacacattgcttgcctggatcatcatgcgggagagcagtacacgaactttctcaccaccggaaagtacacgcattttcttagttccgtcctctccggcaaaaagcatacgtcctaagaaaccgcggacataagttgcatctttgatctcagagaactgtgtgagccagtcaacgatgacaaggtcagtgtcaaaaatctcagtgttatctttcgggaagtaggactggcttgtcgtaacgccccatttgtaagaaccggaatccggctccatttccccggcaagaattttgaataaagttgtttttgcaagctcatttccacctacaaatgcaattttatcttcgtgtcctacgataaaggaaacattgtcgagaacttttacaccatcaattgttttggtgattccctcaacagtcagaacttcgttaccaatttcacggcttggtcggaagtcaatgtaagggtatttacggctggatggacggatctcatcgagctggatcttttcaagagcacgttttctggaagtcgcctgtttggatttggaagcgtttgcagagaaacgggagataaattcctgcaactccttgatcttttcttccttcttcttgttggcttctttcatctgctttacaagtaactggctggattcgtaccagaaatcatagtttccggcataaagctggatcttgccataatcgatatctgcaatattggtacataccttatttaagaagtaacggtcatgggatactacgatcacggtattttcaaaattgataaggaattcttccaaccaggaaatagcatctaagtccaaatggttggtaggctcatccaaaagaagaatatcaggattgccgaacaatgcctgtgcaagtaaaactttgactttcaaagcacctggaagatcagccatcatggagtagtggtaatcggtagaaattccaagaccattcagtaaagttgcagcgtcagattcagcgttccagccgtccatttcagcaaactcaccctctaattcactcgcgcggataccgtcttcgtcagaaaaatcttctttcatgtagatagcatctttttctttcataatatcgtacagtctctgatttcccatgataacagtatcgagaactgtaaatgcatcatatttgaagtgatcctgctgtaagaaagaaagacgctgacccggtgtgatgactacatcaccgtttgtcggttctaactgaccggataaaatctttaaaaaagtagattttccggcaccgttggcaccgatcagaccatagcagtttccttctgtgaacttaatattgacatcttcgaataaggcttttttgcctacacgtaacgttacattatttgcttgtatcattgtaatacctctatttaatatattcctgatttaaacgcatcatcctcattatacataaaaacattggtttttcaaggaaaatttggtataatcaaagtaattatggtgtaatttgaccgaaatagagattacaccgggtttttacaaaaggagatagtggggatggcagaattaaataaggatgagatcaattacgaagctcagctcaggcagtcggagcgtgaacgtaaagatttgaaaaatattatttatgagcttccggttggtctggtcattgtgaagggtggcaatgatctgaggatagatacggcaaaccatgaattttgcagaatgacagggtatgcattgtctgattttagcatggaacgaaaaagcatggcggaacttatccatatggaagattatatgatgtttgaggacgcagcagaggtctgtcgccggggaaaatcatcagatgaatttgaggcgcggatcgtcacatcagatcaggaaatcgtatgggcaatgtttcagttccagatttatgcatatcgaagcgcagtgccatactatcttgtttcctgctgggatatcacagagcgtaagaaaatggaaaatgagatcatgctcgtcaatgagcgttatcacatgttagaagaagtctcggatgatatcgtacttgactatgatgtgaaaaaacagcagtttgagatcccggaatgttatcggaagtttgccgcggacaagagcgtcaaatatgcgggcattgaggaactttacggagccatacatccggatgatcttgaaaagttcaaaaagatgtttgaaacagcattgcagcgggagatgaaaggcacagcagagtaccggcttcgtcagggtgcgcgggattctaagaagtattcctatttcagaacctattatcagagcattgcagattatgatggcaagatcagccacattataggacgaagttatgatatcagcacagagcgggcagtccgggagaaacttctgagggaagtgcagttagatccgttgacaaggatttacaataagacagcctctggaaaaatggtagatgcgtttcttgaaaaatcaacgcagggaacgcatgtactctacgtcattgatattgacgactttaagaagatcaatgataccttcggacatactgttggggacatggtgatctcagatattgcaacactgatacgcgaacagtttacggatgaagcggttgtcggacgtgtcggtggggatgagtttatggtctttgtgaaggacacttctgtgcaggaggcggaggcaaaggcggaacagctgtgtacaaacgtgcagaaaacgctttccggggatggtgcagtccttgttgtgacgttgagtgtcggtatggctgtggcaggaaaagacgggtatgattatagtacgttgtttgaacgggcagatcatgccatgtaccacattaagaaaaatgggaaaaatcattatggctttgcagaagagaccggggagggtgactgtgaaggaaagaaccgcacagaagaaaaggtaaaacctagaaatctgatggcagataaagaatttctgaacacggcattcagtctgttgtcgcatgcaagggatatcaatggttccttgaatgtactcttagagcagattggaagaaaattccggatgaacatggtatctgttttcgaatatgagcaggacggaaagaacatgctgcttaccaactgctggagtgacatgggacagatttatgagaggaatatacttccgatcacctggccaaaactgatgcgggctgaggtgggagagtttgtacagacaactccaaagtggcaggaaaagcggaagaaagagtggaaagactggtcgggaaatgctgttccaatccagtcgatcgcagcagtaaaattcgagtattccaacggaaagaccggatgcatagatgtaggctccatagagacggacaagcagtggcacactgaagagatcggaacaatctgtgagctgagcaggatcgttgcagtgtttgtgacattgcgcgaaaaaatgcaggcagaccagcaggtaatccacaagttaaagaaccgggataaactgaccgggctatacaatctggatgcattccgcacgaaattggtacagcttctggaggcggaggagaatccattggagaatacctatgcccttaccatggtggacgtgaataatttctcttatgtaaatgagaactttggcgctgagatgggagacagtatcctgaaagaattttcccagctgctggaacgcaaaaaagtaatggcagcatgccgtatgtactcagattatttccttgtattgtccaagggaaagagccagcaggagatccggaggcgtgttaaggaagggaatgaagagtttgaggcaaagctgcaggaacgttatccggctggaggaatgaagctttcggcaggaatctgctttctgtcaggaaagagttcgtttgagacgatactggagagcgcaaatcttgcaagaaaatatgcaaaagaacacaacatcacatccggtgttgtctatatagagaaaatgcgtcagacacgtgacgaacaggtgctgatcgcaacccggttttatgctgcaatccagcgtggggaatttgaaatgtttttgcagccaaagttccggctgaaagagaatacgatttatggggcagaagcacttgcgagatggcgctttggtgaggacggctacttgcagccaaaccgttttgtgccggcactggaattgatgggatatatcaaagaccttgatttctttatattggagcagcttctgaaatatatgacgaagtggaagaaatctggaaaaagtctgtttacgatctcaactaatttttcgagaaaacactttgaaaacggtggcgaggcatttttgcaacggatacatgagacaatggaaaagtatgacattgatccttcctatattgaagtggaagttaccgagagcgtcatgacagaaaatcttgaagacctgaagcactgcatggccgaactggcacagatgggattcagcattgccattgacgactttggtacggggtattcgtctttgagtgtcctttatgaaataccggcgaatgttgtcaagatagataaaagttttactgacaaagtgatggtggacaacaagggggaatttgtatcccagatgggaaaatttatccgtgcagccaaagaagagatcgttgtggagggaattgaaacggaagaacagcgtcagttcttggaaagccatgggtttaaatatgggcaggggtatctgtttgaccggccgatcccggcagatgaatttgaaagaaaatatttataaatccatgtttttggcaagtgttttactgccgggtggacagtaatgtttataactttgtactttgttttgtacagtctgaattctttacaacggacaaattaaatgctaaaatgtgaattaagtcgaaagctggcggggatagtattctgcccccgggttagcaaagacattctatcaattttttataattttaaggaggaataagtaatgtccagagcaaaacagtcaatggacggtaatacagcagcagctcatgtagcatatgcgtttacagatgttgcagctatttacccaattacaccatccagccctatggcagatactgtcgatcagtggtcagcagcaggacaggaaaatatctttggcaatcaggtcaaagttgtagaaatggaatccgaagcaggtgctgcaggtgcagttcacggttcccttgctgcaggtgcattaacaacaacatttacagcttcccagggtcttttattaatgatccctaacatgtacaaaatcgctggtgagcagcttccatgtgtatttgatgtttctgcacgtaccgttgcaacacagtctttaaatattttcggtgatcacagtgacgtatatgcctgccgtcagacaggtttcgctatgttatgtgagacaaacccacaggaagttatggacttaagcccggttgctcatttagcaacaatcgaaggaaaagttccattcatcaacttctttgatggattccgtacatcccacgagatccagaagatcgagaaatgggattatgcagatctgaaagaaatgtgcaatatggacgcagtagctgcattccgtgcacatgcattaaatccagagcatccggctatgcgtggatctcatgagaacggagatgttttcttccagcatcgtgaagcttgtaacacagcttacaatgaattaccagctatcgtagaaaaatacatggctaaggttaacgagaaattaggaacaaactatgacttattcaactactatggagcagaagatgcagagcgcgttatcgtagctatgggttctgtaaacgacgttgctgaagaagtaattgattacttaacagcaaaaggcgagaaagtcggattagtaaaagttcgtttatatcgtccatgggtatctgaagcattcttaaaagctcttcctaagacagttaagaaagttgcagtacttgacagaacaaaagagccaggagcacttggtgatccattatacttagacgtagctacaactcttcgtgaggcaggtcttgatacaatcgtattaacaggcggacgttacggattaggttccaaagatacaccaccttcaagcttattcgctgtatacaaagaattagagaaagatgctccaaaagcacgtttcacaatcggtatcgttgatgacgttacaaacttaagcttaccagaagaaaaaccagctcctatcacagctgctgaaggaactgtagaatgtaaattctggggacttggtggtgacggtactgtaggtgctaacaagaactctacaaagatcatcggtgaccatacagacaaatatatccaggcttacttccagtatgactctaagaagactggtggtgttacaatttcccacttgagatttggtgacaaaccaatcagaagcccatactacatcaaccaggcagacttcgttgcatgtcataacccatcttatgtaacaaaaggattcaagatggttcaggacgtgaaaccaggcggagtattcatgatcaactgccagtggtcagatgaagagttagctcatcacttaaatgcagaagctaagaaatatatcgctgataacaacattcagttatatacaatcaacgctatcgacaaagcaattgaaattggtatgggtaaacgtactaacacaattcttcagtctgcattcttcaaactggcaaacgttatgccaatcgaagaagctgttgatttcatgaaagctgctgctaagaaatcttacggtaaaaaaggtgatgcagtcgtagagatgaactacaaagctatcgacgcaggtgttgacgctgtacataaagttgaagtaccagcttcctggtctaacccagaagcagatccagctccagctaagttaacaggtcgtccagagacagttaagatggtagaagacttaatgaatccaatcgcattaatggatggtgattctcttccagtatctgcattcatgggcaacccagacggacagtttgagcagggtgcatctgcatacgagaaacgtggtacagctgtaacagttcctacatgggatgctgcaaaatgtattcagtgtaaccagtgtgcatttgtatgttcacatgctacaatccgtccattcatgttaagtgaagacgaagtaaaagctgctccagctaatatcaaacttgctgatacaaaaccaaaggcaggcgaatacaaatatacaatgagcgtatctccattagactgtatgggatgtggtgagtgtatcactgtatgtccagtaggtgctatcgagatggttccacaggaatctcaggcagaagaacagccagtatttgactacttagtagcaaacgttggcaagaaacctggtatgccagctgacaacactgtaaaaggttctcagttcaaccagccattacttgagttctccggatcttgtgcaggatgtgctgaaacatcttacgctcgtttaattacacagttatttggtgagcatatgtacatctctaacgctaccggatgttcttctatctggggtggtccagctgctacatcaccatatacagtaaacaaagattccaagaaaggaccagcttgggctaactccttattcgaggataacgctgagcatggtttaggtatgcagattggtcaggaagtattacgtgaccaggctatcgcaagcgttgagaaatgtgttgcttctgataaagcaggcgcagaattaaaagatgcatttgctaaattcatggagacaaaacaggatacaaaagctaatacacctgcaacagaagctcttgtagctgaattagagaaagctgcagaagctggttgtccagatgcaaaagctgctcttgagaaaaaagattaccttgctaagaagtccgtatggatcttcggtggtgacggatgggcatatgatatcggtttcggtggattagaccatgtacttgcttccggacataacgtaaacgttatggtattcgatacagagatgtactctaatacaggtggacaggcttctaaagcttccaacatcggtgaagtttgtcagttcgctgctgctggtaaagaagttggcaagaagagccttgctgagatcgctatgagctacggttatgtatatgtagcacagatcgctcttggtgctaatatggctcaggctgttaaagttcttgcagaagcagaagcttatgacggaccatcattaatcatcggatatgctccatgtgagttacacggtgttaaaggtggaatgaaccactgccaggatgagatgaagaaagcagtagctgctggttactggaacctcttctccttcaacccagcactgaaagctgaaggaaagaatccattcacattaacatctaaaccaggcgatggaacatatcaggagttcttaaataacgagacacgttacagcagattaacaagatccttcccagaaagagctgcaaaactctttgctgcatctgaggaagctgcaaaagctcgttacgaacatctgttaagattagtagaattatacaaataagatttagactttgtctgaacgaaatgtagattccaaaagcccggaaaggtttgtgcctttccgggctttttgtgtagattttataaataaaaatgattataataaaaatatcggatatgtggagaaaaatagcatgacagaggaaaaagagcatgaaaacaattttggaaatctgctgtggcagttttgaagatgtaaaaacagcatatgaaaatggtgcagacagagtggaattaaacagcgcattatatcttggtggactgacaccgtcactggcaaatctgatctgcgcaaaagaacagtgcagcattccaatcgtaaccatggtacgtccacggggtggcggattctgttattccaaagaagaatatcagacaatacttttggatacaaaactcatgctgcaacatggtgctgatggaattgcatttggctttttaaaagaggatagaacactggatacagaacgaacggaagagatcattgagctgattcattcctgtggcaaagaagcggtgtttcatcgggcatttgactgtacgaaaaatttggaacagtcgacagaacaactcattcgactgggggctgaccggatactgacaagcggtgggacgccggatgtcctgacagggttggaaacattacgaaaactgcaaacagtgtatggagatgaaatagaaatcctcgcaggaagcggcgtgaacagcctgacagtccttgaactgttagagtatgccggagtgcatcaggtgcatagttcatgcagaagctgggtggaggatacaacaacttcgaatggaacagttgatttctcttatgcaggagaacaacagaaaagtaagtatgaagcagtagatgccataaaagtacatgaattagccagaattcttgcagacctgccacaataaggataaatcagaaaaataatggcagttaataaaaaattgtgtatttatataaaatataaatttgcatgttgacaaagacttgtgaaaaaactataatatttttatattttaaggatagttcacatgcaaatgtactaaaccggaaaagtaagacgccgttgactgcgtgaactttttcggtttttttattcatgataatagaatgacccaaaatgtacattctattattttcaagagtgaggaggagcaaatgcagaacataaccggaaagattgcattcggtggaatcgcaatcggaaaaatcaaagagatttccaaagaaaacaatgtagtcagacgtgtgaagattgaggatgcgaaagcagagatcgcacgttttgaggcagccagagatcaggcggcagaagaactgaaaggactttatgataaagcggtcaaagaagtcggagaggcaaatgcagccattttcgaagtacatcagatgatgttggaggacgaagactatcttgattctgtccggaatatcatcgaggcacagtccgttaatgcagagtttgccgtggcaacgactggcgataactttgccaaaatgtttgcagatatggacgacgattatatgaaggaacgcgcggcagatgtgaaggacatctcagagcgtgtgatccgcattttatcgcagaaagaagaaaaggtgaacacttccggggcggaaaaggaaaaatacatcatagtggcagatgacctggctccaagcgagacgatccagcttgaccgtgagacggtacttgcctttgtgacaagacatggctctacgaattcacataccgcaatcctggcgaggacgatgaacattccggcattggtatccacagcagttccgaaagaggtgaatggaaaaatagcgatcgtggacggattcaagggaatcgtgatcattgatccggatgaaaatactttaaaagagtacgagaaaaaacagcaggacgagaaaaaacgtcaggaattactacagcagttaaaaggaaagccgacagtcacgaaagagggcaaggagatcaagctgtatgcgaatatcggggaagttaaagatttaggcgctgttttgcagaatgatgcagcaggaatcggacttttcagaagcgagtttttatacttacagagtgaccatttcccgacagaggatgaacagtttcagtcctacaaaacagtcgcagaagtgatggcaggaaaaaaagtaatcatccggactctggatattggagcagacaagcagattgattactttggactcgaacacgaggataatccggcacttggttaccgcgccgtgaggatctgtctggatcagccggatattttcaagacacagttgagagcgctgctccgtgccagtatgttcggcaatatttccattatgatcccgatgatcgcatcggtatgggaagtgagaaaagtcaaagagattatggaagaggtaaaagcagagctgacctcagaaggcattccatttaaaaatgtggaatttggcattatgatcgagacgccggcagcagtgatgatcgcagatgaactggcaaaagaggttgactttttcagtattggaaccaacgacctgacacagtatacgcttgcaatcgacaggcagaatgcaaagcttgaccagttttatgactcccatcatcctgcagtgctcaagatgattcagatggtcattgacagcgcacacaaagagggcatctgggcaggtatctgtggggagctcggggcagacttaacgctcacggagacatttgtgaaaatgggaattgatgaattatcggtatcaccggcgatggtgctgcctgtaagagataaaatattaaatgcataataattttaggaggaaatgaaaatgaaatcatttagttacacagtaaaagacgagttaggaatccatgcaagaccagcaggaatgcttgtaaaggaagtgaaaaatttccagagcaaagtaacacttgaaaaagatgggaaatccgtagatgcttcccgtctgatggcagttatgggaatgggagtcaaaaaagaccagactgtgaccgtgaccgtagaaggtgatgacgaagatgcagcatgtgaagcattaaaagcgttctttgaaactaatctgtaaaatccggtagaagatggcaaagatattggctattatgtataggttttggatgcatatatggtagatgtttacaaaaaagaaaaataagtaggaataaaacttgacataataaacaatgaatgttaaaattttattaaatcaaaaacagaacatattggattgttactgataagcaggcaaaaccaaattttacatttctatcttggattttgtaaagtttggtttttcttatttaaggagcttttatcaatacaaagacggagtggcatatgattatccagaaagtaattaataacaacgtaatatcagcatatgatgaggatcatcaggaagttgttatcatgggtaaggggattggattcaaagcacatacgggtgatgcgattgatgagagcaggattgagaaggtttttcggattgagaacgagaagctttcccggcagtttcaggagattttagagaacattccattagagcatatgcagctcacgagtgatatcattacctatgcgagaaagaatctgaatgtacagttgaatcagagtatttatattacactgacagatcatatcaattttgcaattcagagacaggaacagggaatccagctgaagaatgcactgctgtgggagatcaagaagttttatcatcaggaatatctgatgggaaaatatgcgatcgatcttttgaatgaaaaactcggaacaaagttttccgaggatgaggcgggatttatcgcactccattttgtgaatgcagagtacaatacaacgatcaacgatacctttgcaatgacgaatatgatacaagggatcttagagctggtcaagcaggagatgggaattgaatttgatgaagaatcgctccattatgagaggtttgtcacacatctgaagtttttggcacagcgtctttaccggcatgagctgttgaaagatgaggagattgaatttgcgaagctgatggagaacaagtatccgagagagtatgagtgcagtaaacatattgcagaatatattgaaaaagagtacggcggtcagatatccggtgaggagatcatgtttcttgcgatacatattaagcgtgtcagcatgacagactaaagtacatcataatacagaaaagagggattaaggtgtttgattttttaaagaaaaaagacaaaggaattgagattggttcaccggtcaaaggaaaggcagttccgatcagccaggtaagtgatccgacgttcggagaagagatcttaggcaagggtgttgcgatccagccggaagaaggtaagatttatgcaccggcagatggtacgatcgagatgttatttgatacgaagcatgcagtgagcatgacgaccacagagggcgtggaattgctggtgcacatcggattagatacagttgctttgaaaggtgaacattttaccgcacacaagggaaatggtgatccggtgaagaaaggtgatcttttgatcacagttgatttagatgcggtaaaggcagcaggttatgatgtgatcacaccgatggttgtctgcaacacaacggactatcagacagttgaggctgtgacagatacagaagtcaatccgggagataccgtattgatattaaagaaataatacaaaagaaaacattttataaaacacgtattttagccgtattcatggcggcataaaataaaactaaaagggattataaaaaaaggaggagcttttagtatgatgaagtatttgcagaaattaggaaaagctttaatgcttccagttgcgtgtcttccaatctgtggtatcttaatgggtattggatatgcgctttgtccatcgaccatgcagggtggtgatgttaccggtatcgttcagatgatcggtttcttccttgtaaaagcaggtggagctttgatcgataacatggcaattctttttgttatcggtgtcggtgtcggaatggcagacgacaatgatggtacagcaggtcttgcagcattagcatcttggttaatgatgacaaaccttctttccgtaggaacagttacaacattaatgccagcaatcgctgacaatgcaacaaaatctcttgcatttggtaaaattgcaaacccatttatcggtatcctcgcaggtattatcggtgcaacatgctataacaaattcaaaggtacaaaattacctgactggttatcattcttcagtggtaaacgctgcgtagcaatcgttgcaggtgttgtttctattattgtttcagcaatcctgttatttatctggccattattatttggtgcattagttgcaattggtgaaagtattgttggacttgaagctgttggtgcaggtatttatgcattcttaaacagattactgattccaaccggattacaccatgcattgaacaacgtattctggttcgatacgatcggacttggagatctgcagcacttctggagaggtgagacatctgctgatgtaacatgggatttaggtatgtatatgtctggattcttcccatgtatgatgttcggtatcccgggtgcagctcttgctatggttcacacagctaagagtgacaagaagaaagtagcaatcggacttgtagcttccgcagctctttgtgcattcgtttgtggtgttacagagccattcgagtttggtttcatgttccttgcaccagctctttacgttgtatacgcagtattatatggtatcttcacagttattactgtattagttggattcagagcaggattcagtttctccgctggagcaactgaccttattttctctgcatcccttccggcagcaaagaatacatggatgatcattccgcttggaatcgcagcatttatcgtgttctacgttgtattccgtttcgctatcacaaagtttgacttaaagactcctggtagagaagatgatgatgtagaagcagagaaaaaagttgatcttggaagcagcgattacacaactgtagcagcaacaatcttagaaggtgttggtggtgcagcaaatgttacaagtattgacaactgtattacaagacttcgtcttgaagtaaaagacagctctttagtagatgagaagaaaatcaaatctgccggagcagctggcgttatcagaccaagtaaaacagctgttcaggttgttgttggaacaaaagtacagttcgtagctgatgagttcaaaaaattatgtaaataatgaacatcgttcatgacagaataagtaaaaaagtataatccctttcttatcagaagcggttccggttggagccgcttcttttaaactttcaaatcagaccacagaatcccggtcagcaggaagttttttcctttacaagaaaaagcgcaaatgttaaaataaatatagtttattttaggctggctgtgggaggagacgtaaatggcaggtctgtttcagagaatagcacagaattaccggaagaagaaaaaaattacacagccgtctgcaaggctgaatgcaaaagaagataaaacagagcacgcaggaaaagtggtgcgtgccaaggaaaggatacatagtaaagtggaaaaagaagatttcttattaagtcagattgatgaattcagggagaaagcaaagcagttacagaatttactgacatccaaggaaagcaaggtgcaggaactgcagaatcttgtgaatgagagagaggataaagcacaggagttagagcagatcttaaacgagagacaggaagaagcagatgagttagtgtctgatttcagcagaaaagtggacgagcttgcagagcgcgtgactgcgaaaatgaatgagattgagatcagcgtttcaaaacaggttgcagatgtcaagcgcgtgacagaggagcagttagaggcaaaccgcacattaaatgagaatcagatcgcagctaacaagaagtttggagaggagcagcttgcagcaagtaagcagtttatcgaagaacagacagcagccaataagaaagtaagtgatgagcaggtcgcagaggtgaaggcattgttggagaatacagcgtcccagctggattctatcaaaacagatctttcagagaaagttcattccgagaacgtaaaatgctatcgtaacattcaggatctgttcaacgagtttgattctaaaattgagaaaatggatgaaatggaaaaaggtgttggctccataaagggatatgtcaaagtactttcctggttttccattatcaattttgtcatgttagttggattcattttatattctctgggggtttttaatttttaagtagtgaggaatttatgaatatagaaccaaaaaaagtatgggttgtcggacataagaatccggatacggattcgatttgtgcggcaatttcttatgcatatttaaaaaatcaattaggagagcgccagtatgtaccaaagcgtgccggagcgatcagtgaggaaacccgatatgtgctggattattttaaggtggaggatccagaattaattacagatgtaggggcacagctcaaggatatttccatccgcaaaacagccggcatcagttcgcagatttctttgaaaaaagcatgggaaaccatgaaaaagttagatgtcgtaacacttccggtgacaaaccggcttggaaagttagagggtgtgatcgtaacaaaggatatcgcaacctcttacatggatgtttatgataaccgggtgttatcaaaagcgagaacccagtataagaatatcgcagagacactcgatggcaatatcattgcgggaaatgagcacgcatattttatccgtggaaaagtggttgtcggtgtttctgatatcggctttttgtcggagtatatggaagcggatgatatggtgatccttggaccacagaaggaaatgcagatccgtgcacttgaatcgaatgcaagctgtatcattataggctgtggatttgaggtggatccggaagtggtacagatggcagaaaagaaagactgcattatcatcacaacaccttatgatacattttctattgcaaggcttatcaatcagagtatgccgatcaaagagtttatgacaagagaacatcttgtgacatttgatattgacgattatgtggatgatgtgaaagagacgatgtctaaaatcagacaccgtgatttcccaatcttagatgagaatggcaattatctgggaatggtttccagacgtaacctgatgagcatgcagaaaaagcaggttattttggtagatcataacgaaaagtcgcaggcagtagataatattaatgaggcagagattttagagattatcgatcatcacagaatcggaagcttagagacaatctcgccggtttatttccgcaatcagccactaggctgtacttccacaatcatttatcagatgtttggggagaaaagtatcgagatcccgcagcagatagcaggattattgttatcagcaatcctgtcagacacattaatgttccgttctccaacgtgtacgcagcttgatattttagcagcagaggcattagctaagattgcagatgtggatattgagacacatgcaaagaatatgttcaaggcaggaagcgatttcaagaataaaacgaccgaagaaatcttttattcagatttcaagattttccataccgaggagattgattttggtgttgcacagatcagcgcgatgagccgcgaggaacttgataaagtggcagagcagctccgtccgttcttaaaagaagtgttaggtgagaagcgcatcgacatggtttatgtgatgttaacggatattttagaggagtcctcaaaagtgatcttcgaaggtcatgaagcaggaaaaatccttgcagaagcatttgagagggaagaaaatgaaaagggcattctcttagagggaatcatttccagaaagaaacagttgattccgactctgatgaatgcgatggcagagaaagtctgattccttcattgaaaacaggaaggaataacagattgccaaaaggcagtcagtataggaatgatcagtggttgaaagtgctttggcgcagatcccgtggggattcgccaaagcactttttgtatgcgcgggaaaaagtggaataattcttaaatccacattcatagcagatgtctgtgatcggtttcccggataaaatcagttccttggcgagaagcagacgtttggaggaaagatagcttccaatactgtagccggtctgttccttaaatgtgtgcatgaggtagtagcggcttaagtaaaaccgggaggagagatcgtcaattgtgatcgactctgtcagatgttcgttcaggtaatttaaaattgacaatatcttttcacttgaggcggaagtctcaataaattcaatcttattatgtccggcagcgcggtttaactggatcagaaattccaaaaataaaagtttgtggtgcagctcatgtgcaaagtcagaatcctgcagagaggcatcgagatcttttgtaatcgcacccagccggctgtttgcaaatgagtgaacgcgcagcacatgggatttttcttcaaaagctttctgaaaacacatactaagatcactttcagagtcttggtaggaagtcagaaagtcaggggaaacataaatgataatgcggtcatacacagcgtcagaatgtatgatcggtttgtggacttctccggcatggactaagacaatatcgttttttttcaggtcataagaacgtccttcgatacagtaggtcacatctccgttcaacagaatcagaatcttgtgaaaatcgtgatagtggtagtggaaggagcgcatttcctcgtctttcaaatgaaacattttaaaatctgtcgtcagataaccgacctttttatattctggcatggtaaaatcctttctttcgcagtatatgtccgaaaaatcaaagattttccggactgacgggcattcgccctatcacataaaaatgaaatacaaaaatgtccgcaagcagtcattttgtattttatttttatatgatactgctcattgcttacacatagtataaatgaaaaaagcacaatttgcaatatagacaacacagaagttgtatatgttttaaattgtgttttgtataattaggttatatatggaaggcagacagattttctgaggctttacataggcagtttccaaacaggaaaagataagaacaggataagcagaaaggcggatttatattatgaagaatttcagcaattatacagattatgacaaaaaagaaaatttacatttcgaatccaaagcggtacacggggcactcggaacagaaccgctgacaggagcagtgagcatgccgattttccaggcagttacttacagacatccggcacttggagagtccacaggctttgcgtacagccgtctggagaaccctaccagacaggagttagagcgtaccatggcaatccttgagggtggaatcaaagcatttgcattttccagcggacaggctgcgaacatggctgtattttctttgctgaatccgggagatcacgttcttctttctgatgatatttatggcggaacgttccgtattatcggtgatgtgttcggaaaatatggtattgagcatagttacgtggagatggatgatcttgacgccgtaaaagctgcaattaagcctaatacaaaaatgtttttcgttgagacaccgaccaatcctatgatgaaagtggctgatattgctgcattgtctgagatcgcaaagagcgttggtgcacttatggtcgtggataatacattcctgacaccatatttccagaatccgttgaagttaggagctgacattgtaactcacagttcgacgaagtatcttggcggacacaacgataccctttccggaatcgttgttgtaaaagacaatgaggagatcgccgagaaaatacacatccatatcaaatcacatggaagccagttagcaccaatggattgctggttactgcttcgtggaatcaagacacttccggttcgtatggatagacataatgagaacgccaaaaaagtggcagagtggttaagaacccagccgaaggtaaaaaaagtttactatgtcggatttgaagatcacaaggattatgcaacaacaatcaaacagaccagaggatttggcggaatgatctcctttacggtagattcttttgagacagtacagaagattttaagaaatgtggatatgatcatgttcgcagagagccttggcggaacggaaacactgatcacttacccgaccacacagacacatgaggatactccaaaggatgtcaaagagaagcttggcatcacagactgtttcctgcgtatgtctgttggtattgaaaatgtggaagatattattgcagatcttgatcgtgctatgaattcataaaagaaacggatagagactgtcagaaaatgacagtctctgctttacgtctgaagacaaatacttgtaaagctgacattctggttttgtcagatgtgaagaatgaacaacaatttcgaggaataggagaattggatttatgatgaaatttacaaaaatgcaggcatttggaaatgattatgtatacattgatgcaatccatcaggaacttaagaatcttccggaactggcaaggtttgtaagtgacaggcattttgcaatcggttcggatggaatggttttgatctgtccgtcagataaaggggatttccgcatgcgcatgtttaacccggacggaacggaaggcgagatgtgtggaaatgcactgcgaagtgtcggaaaatacgtgtatgaccacagactgaccgataagaccgaacttgtcattgaaacattaggtggtatgcagcatctgacactgacagtgacagacggttatgtatctaacatccgggcagacattggggaaccgagactttctacaaaagtgatcccaatcaacacagaaatggatacatttatcgatcagccagtacaggtgctggatcgcactttcaacattacagccgtttcctggggcaatccgcactgtgcgatgtttgtggattccgttgcggatcttgatgtggaaaaatatggaaaagagatcgaacatatgacatccattttccctaataagacaaatgtgactttcacagagtttgtgagcagggattatttaaagatccgtgagtgggagcgcggaacaggagagacgattggttgtggaaccggatgcgctactgcggtagtgactgcgattctgaccggaagatgtgaccgtaaagtaacggtagagcagattggtggaccacttttgatcgaatgggacgaaaagaccaatcatcttttcatgacaggaccgtcgcatactgtatttgagtcggagattgatgcatcccatattttgcagtaggatgatcgtaaaaacctgtatgagaaaagaataactgttttacaggtatttttatagccggatctggaattaaaaaacgatacattgaaagaaaaggcagcagttaagaaaaaggaaacgataaaatgaaattaagtaaaatttgtgaagaaatagaatacgcactgcttcagggcagccttgagacagaagtgcgtgatattatatacgattccagaaaacttgcaccggaaacgatgtttgtctgcatggtcggagcggtgacagacggtcataaatatatcccggatgcgattgcaaaaggggcttcggtcattgtgctggaaaaggaagaggaagcagcgcagatcccggacacgatcacagtgctcaaagtgcagtcaacacgtctggcgcttgcgctgatgtccgctgcattgtttgaccatccggcgaggaagcttgtcaccatcggtctgaccggaacaaagggaaagacgaccaccacttatatgatcaagaaagtgcttgagatggcaggaaagaaagtcggactgattggaacgatcggtgcgatgatcggagaggaacatcttccgtcaaaaaatacgacgccggaatcttatgaactgcaccgtatgtttgcagccatggtagaagctggctgtgaatatgtggtcatggaagtttcttcccaggggttaaaattagaccgtacagccggtattttatttgattatggtatttttaccaacttgtcaccggatcatatcggaccggcagagcacgcatcttttgaagaatatatggagtgcaagagccttcttttccgccagtgcaggattggaattgtcaacgcagatgatgagcatgtggacggcattttaaaaggacatacctgtgaggtaaaaacattttctgctgaaaaagaagcagatcttatggcatctgacattggatttatcaacgaggatggaaagcttggaatgcattttaaagtgagtggctgcatggactgtcaggcgaaagttcatattccgggaagattttcggtatacaattccatggtgaccatgttagtgtgtcatctggctggcatttcggacgaggcaattttagagggactttccaaagtgcaggtaaaaggcagggtggaaatgcttccggtatccaaagactatacgctgatcattgactatgcacataatgaagtgagcacaagaagcgttctcacgacattgatggaatatcatccaaagcgcctgatctgtgtttatggaggtggcggaaaccgctccaaactccgcagatatgatatgggtgaggtgacaggtgagatggcagacctttgtgtattgacctgtgacaatccaagagatgaggaaatccgtgatattaacaatgatattaaagtaggtcttgcaagaagcaacggcaaatacatcgagattgacgacaggaaagaagcaatcgcttactgcatgaaaaatgcaaaaccgggcgatatgatcgtgctccttggaaaaggacacgaagattatcaggaaatcaaaggtgtaaaatatcattttgacgagcgagaggcggtagcggaaattttggatgagatgaaagctggaaaacgttaagtttttatcagacaaatgaaaataagaaaacgccgggtttagagcgttgatgaacaaaaaagaaaagccttgagggaatgtatgcagacattcttttaaggcttttccaaattaagaagggggttataattaataaaacccatgtcgtggtattaccacaacaattaatattatgcaccagattcgacaaaaaatccagtgaatttattgtgaacaaaaaatgtacgaatcgagattgaaatgtgaatgtatggaagatttaacggaacatcatgttttgtgtgaacgggatatgttatgataaaaagaaaaacacaattaaagtttgaaaattcataggatagataacaagaaacagaggatggagttaaatgggtttaaatataggcagacttttatatgggatacgaacaaaatatgaaatgaatgtaaaggatatttgcagaggaatttgcagtccatcgtcatattgtatgtatgaaaatggtgagatcgtacctgatattttacttgtaaatatgtttttggacaggatgggatttggaatattgggattgacggcttatatttctgaaaaagaagtagtttattttaaatggaaagaaagtaccagagcgtgtattcgaaatgaaaactataaaaaactggtgatgttactggagcatatgccgaccggaaatgtttcactaaataagaagatcagagagcagtatgcatggttcataaaagggattgtggctgagaaagatactgcagatttaaagaaagcaacagaatgttatgagaaggcattggaatgtacctgtggttttttgataaaatcgcagaaaatagagggaactttcagtgtaagagagatacatatttatgctatatatctgaatttgttatgcaaagtaaatccaaaggaaaaagaagaagttatttcaagattttatcagttaatgcagtatgttaatgttcattatgtagaagaacagcagaaagtaaagatatatccgcttcttgtctgtctttggggaaatcttgtaatagaggggaaagatacagaaggctcatttgaaatatttgaaaaaacacttgaattattgcgaaaacaaaaatcgttgtattgtttattggaaattatgcgtctgcatattttggtaggtttgaaagaaaagcgggatatgagcaaagagcaggaagatatcaagatattacaaagtttttttgaagaatttggctatcaagctcaaagtcagatatatgtgccgcaggcaaatgaaattatgctggagcatgtaggacaatatctttcaacagaaagaaaaaaagtaaattacacacaggaaaaaatcagtgatggaatctgtagtgtggaaagttattcaaggattgaaaatggtcgtaaaccaacacggaataattataaagcattaacagaaaaaattggtacggagaatcgatattatatagaattggtcaatacaggaaatattgatgcgttacttttgcgtagagaaatctcatatgagttgtttatggaaaaaaatgaaagattgccagaattattagaggagttgaagacggttttaggcgaaaaagaagtggcgaaaaatagacagtatttggaatttgttcaagtttctatagaagaaaacacaggaagaaaaacatggaatcagtgttgtgatatgtttcgtaatattttgtcttatacgatgaacgagaaagaaattggtaaaaaaagacatgtttacactatgcttgaaattaatttaattgatcacatatctgtatgcatggcgaaagatggaaaatcagaagaagcaatgcatcttataaaagcttttttagatgatatggattacatgaaaacagaaaaatattatgaaacttttttggcaaaactaaactatgctagatggaaatcggatagaggaaattttgatgaggcagaatgtatatatagagaaggaatagaacaaagaatacggagaaacaaaacggaattattagatgaatatattggagagtatgcatataataaatatttaaaaaataatattaatgaaaagcaagatgtgaaaagatatttattatatgcattggtattaagcagaatatacggaactcaaagagtctacaaaactatcttacagtttttcaaaaagataaatgaagaagattaaatatttttgttatcattttcacctaaaagagatgccggagcaacagacgaagcagaactgataaaggtgtattttccgaaattcacggtgacaagtaataataataaaataaataaagttttgttttttttcatatgaattcattctctttttcttttgaatacactcattttaggtgcaagtagtacaaaataacatgacgttttactgaaaaaatattttttcagtaaaacgtcatgttattttgagagtaatatagatattataaatatacatatattaaataaaagggaaggaggaaaatggggttaattgatactgtagtgacactacctacaaagtaggaggtgggggtatatgaaaaaaaagatacaggcattgtacacatctttatttatgggaatcttattattcatggcaggagttcaaacatttgcgggaccatcttatacatctaagttttctgattggggaaatttgcttaaacaatatgcaaatgatgaaaatggaagtgaaatgatatatgcgagaggaaagaatggagttataacaaataaggaagtagaacaggcaatagcgttttatgatacttttggaatgagtgcggaagaagcaaggaaacaggcaattttatatgttgaggaacgggaggcattatatcagcaggcaattgaagctggatataccgtgacagatcaagaagtatatgattatttagaggaattaaagcaatttatcaatcagtcagagaataaagaagatgcaatggcgattatagagcaattcgattcagaagaagattattggaattatgaattcgaagtttataaaaaagatttgccgatacagaagtatatggcagcaaaggaaaaagagtttaaagaagttgcgccacaggcaaaaagcataaatgaaatagaagaagaatggcaggattattatgaacaaataaaagcgcaggctgttgaaaacgaagagtttaaagtagtagactaaattgcatatatagaacagggtatgttataatcgagtttagaagaggaaaaaagtcttattggaatcatatctttattttaacaatattgtcagcgcctaaggaggatatatatggggaaaaagagaatttatgtggcattatgcctcatcgcattggcgatgcttggaatatgtttcttttatttaaagaaaacaggatggggaatgacaggtgacaaagcatggaatgaattgttggatctggataaaaatataacattagaacaacttgaggcaaagggatatataaatgtaacgggatgtctggatgaagaaaatgaaacgattagtgaatttatcgataatgcaggaaacaggcgtccggctgttcttagacttacaagtaatgagaatgatgatttgtgtgctaagatactgttatatgataaggattataattttattcagatgtggacgatgtatcctaacagacagcaggctgtagctccgggaaagtgtttttcaacggatgtggtttcaagtgataaagatggagttgtaacagtaacattaaaaaatatccagaatccgacggctccggcagaagaaatactgcaggatgagaagctttataaatggaaaaactaaaattgtcaaaaaattaacaaaacagcttgtttttttcatgttgtgtgatagaataaaaaagcaattgaataatgagaggaaaaagcaattcgaagaggagaagagcaaattatgaaaaaaagattacacattcttttcatggcacttctggcaatggctgtactgggcggatgtggcgcagatggcacaggagcgtcttcggaggatacttcctctaaggagcagaatgtacaggagacagaaatcagtgaaggacctgtatacggcggctccgttgttgtaggcatacagcaggatattgacagtcttgacccacataaagcaactgcggcaggaactaaagagattctgtttaatgttttcgaaggtttggtaaaaccggacgagaatggtaacctgatttgcgctgtagcaagtgattacagcatctcagacgatggattagtttatacttttacattgagagatggtgtgaagtttcataatggtaatgatgtgacatgcgaggacgtgaagtattcattagaaagagtggcaggtcttttagatggaacaccattggtagcaactttgcagacaattcaggcagttgatattttagatgacaagacggtccaggtgacagtggatacaccgaatacagagctgatctacagttttgtaactgcaattattcctgcaggaagcggagaagatgcagaggcgaatccggttggaacaggaccgttttcttttgtttcttacactccgcaggagggaatcgttcttgcaaagaatgagaattactggcaggaaggacttccttatcttgatgaggtagattttaaaattgtgggaagtgcagatactgcattgttagagcttcagggtggaagcattgatatttatgcatacctgacagattctcaggcgaacgagttaaaggacagctttaatgtgatttcatccccatccaatgttgtgcaggcattgttcttaaacaatgattatgaaccgctttctgatgtgaaggtacgtcaggcaatctgctacgcactggataaagacatggtaaatgagtttgtagccggcggaaacggaacgctcatcagctctgcaatgcttcctacattaaaggattactatgaggacttaaatgatctttatggtacatccgcaaatgtggaaaaagcaaaagagcttcttgcagaggcaggatatgcagatggctttgatcttgcgatcgcagttccatctgtttatgagttccatatgcagactgcagaggttgtggtagaacagttaaaagcagtgggaatcaatgcaacgattgatgctgtagaatggaatacctggttagaagatgtttataccaacagagagtatcaggcaacgatcagtggcatcacatgcagtgacctgacaccgggatatctgctgaaccgtttccagacagattcgaaaaagaactttgtgaacttcaagagcacagagtatgatgaactctggaaagcgacacaggcatcacaggatgccgcagagaaggcagcagattataaaaagcttcagacgattcttgctgaggaagcagcaagtgcatttatccaggttccggcgaacacaacagcatttaacaagaaccttgcaggatacaaattctatccgatttatgtacaggatatgagtacagtttattttgtaaaataagacggacacaaaaaattatgctgttaacatctgatcagaaaggaaagcagacacatgaaatttttaataaaaaaaatatgcactctcattatgacattgtttctcgtttcagtagctgctttccttgcttttcaggtaattccgggagatgtggtacgttccatattgggaacggaggcaacaccggagagagaagcacagcttcgagaagagcttggcttggacaaaccaccggtagaacggtatatttcctgggcagatgatgtactgcatggggattttggcgtgagttaccggtattccaagaatatgaatgaaatgatgcccgtgaaggaattgataggagataagctgccggtgacactttatctggcagtgatttcatttgttatgatcgtacttgtgtcaattcctttgggggtattgtgggcaaagtgtggaaacaggttcttagatgcagtctttggagtcttaacgcaggtcacgatggcggttccatcattttttcttggaattttagtgacttatctgtgtggtattgtattaaaatggtttgtaccgggcgggtacataagctatcaggagaatatgaccggatttttagcatatttactgttcccggcgatttcaatcgctttaccgaaaatagccatgacagcacgttttttgcgtaattccatgttgacggagatgaagcttgactatgtgcggactgcttacagcaagggctgcaacaggaatcaggtcatgttcggtcatgtcttaaaaaatgccatgatgccggtcattacatttctcggcatgatgatcgcagaaattttggcaggaagtatcgtggtagaacaggtgtttgcactgcctgggatcggcaggcttctgatcagttcggtcggaacaagagaccttccggttgtggagattttgattttatatattacctttgtggtgatttttgtttattttatcgtggatattctttaccgggtgatcgatccgagaatccgtaagagtgaataaaagccgcaggacagatgcctccttttgcagaggagcaggcggcattgtgcagggataggcttgtgatacggagtgtgaaacctatggaaaataagaaaagaaaaaaatggaacggatatcttgcagcaggcctgtttatgacaggtcttgctgtgtttttggggattttaggatatttttggacaccatatagtacaactgccatgtcagcagcagagaaatttacagcaccttccatgcatcatatttttggaacagacaatttcggaagggatattttttcaagagtgatgcagggattgggaacaacgcttgtgatcagcacatcggtcgtccttttttcaactgtggcaggtgttttgttaggagcatttaccggatatttcggaggtgttttagatgagatcctcatgcgcatcacggatgcggtgaacggattcccaagtattctgcttacgcttgtgatcatatctttactcggaaaaggcaggcagaatgtgatcatcgcacttggaatcgtatttatcccaagctttgtgcggattgtccgcggagaatttttacgtcttcgtgatgcggattatataaaaagagcaaggctgatgggagtaggcaggttccgtattctgttcatacatattttacctaatattttttccgtgctgctcgtttcagtgatgatcggttttaataatgcgatccttgcggagtccggcatgagctatcttgggatcggagtacaggcaccggatgcgagtcttggcatgatgctgtcagatgcacagggatatttgcagaccgcaccatggtatgcactatttccgggacttgcgatcgtatgggtcgtgcttggattttcactgctgggcgagggtatccggaaatgggacgggagcagggcagagtagaggctgtgtggtagaatgaatgacagactggggataagtatatgaaagtggaacagcaaaaagacagcaaacagaaaaaaattgttcagatagaagatttatccgtttcttttgatggaatggaagttgttaagcatgtaaatatagaagtgaacagtggtgagatcgtaggaattgtcggagaatcaggatccggaaaatcaatcacctcactgacactcatggggcttctgtcaaagcaggcacaggtgacatccgggaaaataatcgtggatggggaagtattaagagaagcagacagaccttttgatgagcggttgtaccgcagatttcagggaagccggatgtccatgatatttcaggagccgatgacctccttaaatccgacaaaaaaagccggtgtccaggtggatgagatcgtaaggcttcatacggatcttgagaaagagaagcgttacgaaaaagtactggaaacttttcaggcagtcgggcttaaggatgcgaagaaggtttatgacagttatccgcaccagctgtccggaggcatgagacagcgggtgatgatcgccatggcggtgatcctgcatccggatctgatcatagcagatgaacctacgacggcattggatgtgacgatccagacacagatcgtggaattgttaaaagacatcaacaagagtgaacagaatgcaatgctttttatcacacatgacctgaatctggcaagacgtatctgccataaggtcgttgtcatgaaagacggagttgtggtggaagcagatgaaacagagaagattttcatgcacccgaaggaagcatacacaagaaatctgatcgaggcagttccttccaggttaaagccgaggatttccgtaaaaaaagaaagcaatacaaaggttcttacggtaaaagatctgtctgtatattatgaagacagatccaattccattttcaaaaagaaagaaaaacaatatgcggtagaacatgtcagttttgatgtgtatgagggagaaagcctaggtctggtcggtgagagtggctgcggaaagacgtcgctttctaaggcaatccttggaatgcaggaacacgtgtcaggagaagtgagctgtcatgtcagccgcccccagatgatttttcaggatccgtacagcagccttaatccatccaaaacgatcgggtggctattgatggaaccgctcagggcagcaggaatgcttgataaaaaatgcgcaatgtctaaggctgaccgtaaggcggcggcttatgatatgcttgcccgcgtcggaatggatgagaagtatttccatcgtctgccatccgaattgtccgggggacagcggcagaggatcagtatcgcacaggcgcttatcacaaatccggggtttatcattgcagatgaaccggtatctgcactggatgtgaccattcaggcacagatcatggaacttttacagaaactgcaggaagaaatgaacctgtcatatctgttcatatcccatgatatcaatgtggtttatcatatgtgcgaccgtatcatggttatgaaggatggaagaatgattgaaataggggagacagaagatatttttcacgatccgaaagaagcctatacgaagagtctgctcgtataacaaaataaatgtatgatcgtatagtcgggatttcatataataattgccgaaacaatgtgagtatggtaacatatataggcaaaagaaaagctttgaaagagaaattttctatttttaagaaacaggagaaataaagagtggcaattgatcagagtagaattcgtaatttttgtattatcgcacatatcgatcacggtaaatcaactttggcggatcgtatcatagagagtaccggaacactcacaagccgtgagatgcaggcacaggtacttgacaatatggatttggagagagagcgtggaatcacgatcaaatctcaggcagtgcgtattatttataaggcaaaagatggggaagaatatattttcaaccttatcgatacaccgggacacgttgattttaactatgaggtatccagaagtctggctgcctgtgacggtgcaattttagttgtggatgcagcacagggcgtggaggcacagacacttgccaatgtgtatctggcattggatcatgacttggatgtgatgccggtcattaataagatcgatcttccaagtgcgcagccggatgaggtcattcaggagattgaggatgtgatcggcattgaggcacatgacgcaccaaggatttctgccaagacaggacttaatatcgatcaggtgttagagcagatcgttgaaaaaatcccggcaccgaccggagatccgtcagcacctttaaaagcattgatcttcgatgcattatatgattcctataagggtgtcattgtgttctgtcgtgtgaaagagggaacggtaaaagtcggggacaagattaaaatgatggcgaccggagcaatggatgaagtaaccgaggttggctattttggtgcaggtcagttcattccatgtgaggaattgtcagcaggtatggtaggttatatctgtgccagcattaaaaatgtgagagatacccgtgtgggtgacacagtcacaaatgcagaccgcccatgcgcagaggcacttccgggttacaagaaagtgaatccaatggtttactgtggcctttatccggcagacagtgccaagtacccggatttaagagatgcactggaaaaattacagatcaatgatgcttctttatattttgagccggagacatcattggcacttggcttcggattccgttgtggatttcttggactgcttcacttagagattatccaggagcgtttggagagagaatttaaccttgatcttgtcacaacagctccgggtgttgtatacaaagtgcataaaacaaatggtgaggttattgatctgacgaatccgtcaaatctgccagatccgtctgagattgaatatatggaagaaccgattgtttctgcagagatcatggtgacaaaagattatgtcggtgcgatcatgacattgtgccaggagcgtcgtggcgtctatatcagtatggagtatttagaggagacacgtgcactcattaaatacgatcttcctttgaatgagattatttatgatttctttgatgcattaaaatcacgttccagaggttatgcgtctttcgattacgagatgaagggatacgaaccgtctgaacttgtaaaacttgatatcctcatcaataaagagcaggtggatgccctttcctttatcgtattcaaggacagtgcctatgagcgtggaagaaaaatgtgtgagcgtttgaaagaggagattccaagacatttgtttgaaatcccgatccaggcggctgtcgggggcaaagtcattgcgagagagaccgtaaaagccatgcgcaaagatgtgcttgcaaagtgttatggcggtgatatctcgcgtaagaagaagcttctggaaaaacagaaggaaggtaagaaacgtatgcgtcagattggtaatgtggagatcccacaggaagccttcatgagcgtattgaagttagatgaggactaaggagaaagcagcagtcttcgtgaaagaaataaagtaataaataattgaaataagcaacagaccacgcagtgaaactgccatggtctgttgtgttatgaggaattttatggagaagaaagaattagaattatatatccatatcccgttttgcgtaaaaaaatgtgattactgcgatttcctttcttttgcggcggacgagcagacacagaaaaactatgtggcggcactgcaaaaagaactggctttttacggaacaaagtacaaagaccgcaggatcacaacaatttttatcggtggcggcacaccatcctggctgaatgaaggtgatatgcaggcaatcatggagacggtgtaccagtgcttttcggtggagcctgatgctgagattacaattgagtgtaatccgggtaccattacggagcataagtttcagatttaccggaaaatcggaatcaaccgtctgagtatcggattacagtcagcgcacaatgaggaattaaaaattcttggaagaatccatacttatgagcagtttctaaagacttatgatatggcacggaagcatagatttacgaatattaacattgatcttatgagttctctgccgggacagacaccggatattttctgtgattcgctgcatcgtgtattgcaattaaaaccggaacatatttctgcctattccctgatcattgaaaaaggaacaccgttttatgatctttataaatttgatgcagttaagcaggaggcgggcatgcagacggaatcccttccgactgaggaggaggagtaccagacgacaaaactcacacagcacattttaaaggaggctggttatcactggtatgaggtttccaattttgcaaagccgggatatgagtgcagacacaatatcggttactggaaacgtgtcgactaccttggtgtaggacttggcgcgtcatctttgatcgacaatgtgcggtattcgaacacaagggatttatacacttatttatcagaatgtgaaaaaattcacgattgctatatgcagtatccggcagaggagagcggcacagataatctgatgagatcggaagacggaaaatatagtttcgttccggcagtcagcctgcatgcggtagccgagcagactacgcggaatgagcagatggaggagtttatgttccttggattgcgcatgcgcgatggcttttaccgggaagaattcacgcaggcatttggaatcccgattgaagcggtttatggagatgcattaaatcatttgcagcaggaggaactgctcctgaaacgtgagggcaggatttatctgacggacaaaggcatggatttaaataattatgtggtggcacagtttatgttgtagaaagtgcaggaatctgagtgtgttttggaacagcacagcaaattttttcaaatcacaataaaaaacaaatattcacacaaagaacaattatatcatggaatacttttaagaaattggaagttcataagcgagttggaaaaaggatacctttttgaaaaaaggcgtccttttttttgtggcgattcacgttatgctggaagatacaggagggagaagatcatgaaaaagagatattgtgagagatttctgtttgtatttggggcagtatgcatgctcatgacagggtgtggaacgagggaaagcagtaaaatggatacaaaagatatgacaatcagggatgcagatttccatacagaattatttggtgataacacctatattttttcgccggaggatgaaccggaaaaggtagcaggaatattggaccagatctatgaaaagcaggaagcaaaccagtttgggaatgaacggtatgccatttattttatgccgggagagtatgatgaatcaattgaggcaaatgttggattttacacacaggtggcaggacttggagaacttccgactgacacaaagattgagagtttacagtgcaatgcgaggtggctttcggatgatccgtcaaaccataatgcgtgctgtaatttctggcgcggcgtggaaaatatcgagttaaaaacaaacaccgtatgggcggtctcgcaggcaacctttatgcggagagtgcaggttgacggtgcattgtttttgcatgatgactacggatggtgcagtggcggatttctcgcagattccaatacggatcttatgacagattccggttcacagcagcagtggctgtcgagaaactgtaattggaaagcatggatgggtgccaactggaatatggtttttgtcggcactaaggagggaaagaacccacagggaacatggccggtcgttccgtataccgcggttgaaaagacagaggttatgcaggaaaagccgtttctgatatatgatgacgaagccggctatatggtttatgtaccaaaagagcgtgaaaatgccacaggtgtttcatgggaaaatggcagtgagggagaaaaaatcctaatcgaacagttttacgttgcaaaaccggaaaaagatacggcagagacgatgaatcaggcattggaagaaggaaaaaatctgcttctcacaccggggatttatgaccttacagaaccgattgttgtgaaccgcgcggatacaatcgtgcttggcatgggacttgcaaccctgcgcgctgcaaacggaacagcatgtatggaaaccggagatgtgcagggactcatcatagcaggacttttgtttgattccggggaaacaaaatcagacaatcttttagttgttggaacagaaaaggaagcgagtggggatgcagaaaaaaataattatctgagcgatttgtttttccgtgtcggaggaacggacacagagaagccggtcagtgtgaagtgctgtgctacgatcaacagcgaccatgtgattggcgataatttctgggtatggcgtgcagaccacggcaatcacgtggcatgggatgaaaacgaggcagaaaacggtatcatcatcaatggggatgatgtgacgatgtatgcgcttatggtggaacatttcaaacagtatcagacgatctggaatggaaatcgcggaaaagtgtatatgtaccagagtgagattccgtatgatgttcctgcgcaggaagtgtgggtgagtcatgagggacagaagaatggatacgcttctttttatgtggatgatgctgtggatgcgtttgaagcatggggacttggcgtttatctgtataaccgggatgcagccgtggaacttaatacagcaatggaagtaccggacagggagggcgtgaaagttcataatatctgtacggtaatgctgaccggctatccgggcatgaaccatattatcaatgaatcgggagattctgtgacatatgccgggcagcggaatgtcatctgtgaatatgagaatgaagtagtgcggtaagatataaaaaaaggatacctttttgaaaaagggtatcctttttttttgccttgctttttttaaaataacagtaaagagtcagaaggtctgaaaaattatgacacagcaaaataggaaggacaggggcagaatgaaaggatatcagtttgaagatacacagggaacattccatttggaaaaagcagaaaatatcagctatctttattttccaatcgcaggggaagcaggattgaaaagttcttttacgccgaatctcggcggtgatgcgaagatcgatcagaatacatttttattagagccggtgagtgcggaaaatctggtgaataaccgaaacagcagaaacttctggtgccatgtgaaaggaatcggaatctggtctgtgacaggaaattcggcagaagagataagcaaaaaattcacagagcttcaggacgacagtgaggtcacagccggattcatgtggcagaaaaccacgagatcgtcaaaaaaatatcaattaaaaggggaagtagtttcttttatcccggtagataaaaatgttgagattttaatggtaacaattaccaacacagggcacatggcgcagacagtgacaccgacagcagccattccgctttatggaagaagtgcagataatatccgggatcacaggcatgtgacatccttgttacatagaatcgagataaccgatacaggagttttagtcacaccgaccttatcctttgatgagagagggcatcagatcaaccatgagatctattattgcgtcggctggacggaagcaggagaaaaaccggaggacttctatccgacagcggaaggttttgtcggagaaggcggtaactttgagagaccttatgcagtggtgaaaaatgcaaaaggtgtaacagcagaaacgaagatagagggcttagaagcggtcggcggtctgcatttcgcggaagttacattagaaccggaagaagaaaagacatatctgatctttaccgggatcacggagaacgagcaggaaatcaaaaaactttctaaggaatatacgaccaaagaaaaggtgtgtgaggaatttgaagaaacaaaagcgtactggcaggaaaaagtaaatgttttctatcagaccggagatccggatttcaaccagtttatgcactgggtaagctttcagccaattctacgacggatttatggatgttcttttcttccgcatcatgactatggcaagggaggcagaggctggcgtgatctctggcaggactgtctggcacttttaattatgaatccgggtggcgtgagacaaatgctgttagacaactttgccggtgtccgtgtggacggaagcaatgcgacgatcatcggaagcagacagggagaatttgttgcagaccggaacaatatcacaagagtgtggatggatcatggcgtgtggccacttatcacgacaaagttttatatcgaccagaccggagatatcacgttattagaaaaagaggtaccatacttcaaagacaaacagatcgcaagaggcaccaaaacagatacactctgggaggaatcctacggctgctggcagaagaacagaagcggaatccgggaagaaggaacgattttagagcatctgcttttgcagaatctgaccgccttctatgaagtgggagagcacaataacataagactgcgcggggcagactggaacgatgccttagatatggcttctgagaagggagagagcgttgctttttccaatgcttatgcaggaaatcttgcagatcttgcggaattgctggaagcatatcagaaaacgacagggaaagaaaccgtgtcacttttggcagagattgtgatcctgctggaagatcatcaaaagctttatgaatctgtttcaaaaaaggcagaagtgttagcagaatatctgcatacctgtgaacatgatacgagcggagaaaaggtggagatctccattgaaaaactgatcgaaaatctgcgtcacaaatccgaatggctgatgaaacatatccgggagaatgagtgggtaaaagacagtgagaataatggctggtttaatggttactacgataatcacggacgcagagtggaaggtgagatgaaatccggtgtccgcatgatgttgacaggtcaggtattttccattatggcaggaacagcgacgaatgagcagatcagacagatcacaaagagcgcagaccgttacctgtatgacgcaaatgtgggcggctatcgtctgaatacagatttcggggaagtaaagactgatcttggaagaatgttcggattttcttatggggataaggaaaacggtgcggtcttttcccacatggcagtgatgtatgcgaacgcgctttataagcgaggatttgcaaaggaagggtataaggctttgcaagcactttacagacagtcagtaaactttgaagtaagccgcatttatcctggaatcccggaatattttaacggcaggggacgcggcatgtatcactacctcacaggtgcagcaagctggtatatgttaacggtcatcacagaaatgtttggtgtgcggggaaaaatcggagatctgatcttagagccaaagcttttaaaggaacagtttgacgaggagaaaaaagcgtcactctcactacagtttgcaggaagaaactggaacatcatctatcataacccgactggaaaagaatatggaacctatcagatatcaggcgttttggtagacggaactgaggcagaacttttcaaaaacgagtcagcagtgatccaaaagggcatgatcgaacagctttcgattggagagacacatcagatcgaggtagttctcgcttagagaaagtggttctgtatcagaagacatcataaagaatggaatggagaaaaatatggcagaggaaaaatttttaatcgaaaattatggaaaaaagagtacattcgcaagctttcttccaggtatttccggagagaagggaatcccaatctggtgctattatgtaaaccgaggacagtgtgtggtcagttttggcgtggataataaagatcattcgatcatggaattttatccggcacatcaggcttaccagaacgtgaaaaccacaggtttccgcacgtttgtgaaaaaagacggcagcgtgacagaacttttttcagatgagaatcaggtacaccgcatgtcaattgcgatgaatggactggaaatcgaagaagaaaatgaaagtcttggaatcacggcaaagatcacatactttacacttccgggagagaagatcggcgcattagtgcgtaaggtagaacttacgaatacagatggaaccactgcggacatagaagtgttagacggtatgccggcgctgatcccatatggggtaggaattgacagcttaaaaaatatgtgccagaccgccaaagcatggatgcaggtggaggatgtgaaagaaaaccgcccgtatttcagagtgagggcgagtatggcagatacggccgcagtaacaaaggtagagggcggcaatttttcaatcagttgtcttgcagacggaaaaagattacagccggttattgatccgaccgttatattttcctatgacacttccttacaaaagccggtcggattcgagcagcagtcactgaaagaactgttgcaaaaagagcagatcacaatgaatcagatgccatgcagcttctatggagtggaagctaaactggctgcaaatgagtccataagcttttatgaagtgatcggacaggtggagaaaaaagaactgctaaaggaatatgcagacaaaaaactggacgcttcttattttcaggcgaaagcaaaagaggcagaaaaattagcagagcagctttgcagtggaatcacgacagagacagcatcgaaagattttgatgcatattgcaagtatacatacatggataatgtgttgcgaggcggctatccgattcgccttggaaatcataagattttttacgtgtattccagaaaacatggcgatcttgagcgtgattacaattacttttccatgctgccagagttttattcgcagggaaacggcaatttcagggatgtaaaccagaaccgcagatgtgacactttttttgctccttttgtgggacgggagaatatcaaagaattttacagtctgatccagttagacggctacaatccgctcggcgtggaaaaactcacctatcaggtggcggaagaaaaggcagaaagcctgttgtcactgcatgaaaatctgtttcagacaaaacaggagaagcaggaacttggcgagcttatcaaaaaaccattcacacctggtaccttataccggaagttagaagaaaaaatcggcgagaaagaaaccaaaaatctgtttttccagatcatcgatcaggcagacggattggtgaatggcaatttcctcgaaggttactggagcgaccattggacatataaccttgatcttgtggaagactatctggaagtgttccaggaaaaggagaaggaattattgtatgagagagattacacgacattcctctcacaggtcaatatcaatccgagacgcagacgttatgcggaaacggaaaacggtttgcggcaatattatgcgttagatgagaaaagccgcagaaacacagaggaaaaactggtgcgcgagtcaaaccagaccggaaaagtgttaaaaatgactttattggaaaaactggtattgctctgtgccacaaagtttgcagcattggattcttatggcatgggtattgagatggaaggtggaaaaccgggctggtatgatgcgttaaatggtatgccgggaatgttcggttcttccatggcagagacctatgaacttgccagaatgttcgaatttacgatcagcgcattaaaacgctatccgggagaactcgaactgatcgaggaatttgctgatttcttacagcagcttgacctgatcaatgcgagtgaaaaagatgcggtcatgttctgcaaaaaacagggattccagttggcagaagaaatcaaaagagagggtgagatcctttctttctggaatcagatcaatgacgcaaaagaggcttaccgcaaaaaagtattcgaaggaattaccggcattaaatatcttgtttccacagaaaaggttgtgaagattttaacggaattggcagagacagtatcctgtggtattgaaaaagcctgcatattgggaaatggtatctgcccgacgtattttacctatgaagtttcagaatataagaaggtaaaagacggctatgaaccgctgaaattttccgtacaggaagtgccgtattttctggagggaccagttcgttatctcaaattaaagaccacaaaagagaaaaaagcaaaactgtatgagcaggtgagacacagtgatctgtatgatgaaaaactgtctatgtataaagtcaatgcttcgctgcaggatgcttcgtttgaacttggaagggcgagagcatttacaccgggctggctggaaaatgagtctatctggcttcatatggaatacaaatatctgttagagctgatcagaaatgggatgtatgaggtattttttgaagattttcacaaagcagccattccatttttagataaagaagtgtacggaagaagtatttatgaaaattcttctttcattgcaagcagcaaaaatccaaacaaagcataccacggcaaaggttttgtggcgcgcttaagtggttcgacgatcgagtttatcagcatgtggaaacagatgatgtttggcagccatattttatccatgaaaaatggggaactgtattttacaccacagccggcagttccggcatatctgatcccggagaatggaaaagtatctgccatgttatttggaaagacaaaagtaacttatcagtttgcagatgtcgccgattacattccgggacgctatgagattacatccatgaagtttacttatgagaatggaagcgttgcaaatgtgaacaccgcgatcgccggagaaaaaattgcaagggatatccgggacggactcgtgacatccattgagattgatatccgctagcagacaaaaaagggagtatttttatataagaaaaatagacaatattcataacctgaaattgagttttgcaattgtctaataaacaacaggaggtatcagatgaaaattatcacaacggactacgaaaacaagaaattctgggagaagacagctatgaaaagagactgacttactattatattggtcatttcagccgttatatcaaggaaggagcggtaaaaatcggcacttcccgctatacagacggactggaagtcactgcatttttaaatccggacggagagcgcgtggcaattttattgaacaagtctgaaaaagaaattccgtacacgctgcgtgaaatggcaaaagacgcaggatatcagggcacggaaggtgttttggcacctcacagcatccagacagttctttattaaaaaaagaacacctaaaaaaaagacaccattttaaaatttggtacatttttacaagaggagaatcctcttataattcaattatcaacaaacaacaaacgttgttatatacaaggaggctaaatcctctcctcacatggagttcggatttttgcttcgcaaaaacaaggaggatgtatttatgaactggaaaaaagtagtatcagtattgctcgtcagtgccatgacattatccatggcagcatgtggggacaccgcaagcacaagtgacagtgcagcaggaacagagagcaaaggaagcacaagcaaagcagaggcatctagcgatgacaaactggttgtatggacattgtcaaatgacttaattgactttggggacaagttccaggaagcaaccggagtggaggttgacacagtcgtaattgaaccagctgattatccaacaaaagttcagacagcattacttgctggagagaaagaaccggatatcatcgttggtgagccaaagatgttagatgatttctttgacgcaggtttcttcgaagatttgaaccaggcaccatacaatgcacaggattatgcagatcagatcgttgattatgtatggcaggtaggacaggatgctgacggtatccagagagcaatctcttaccagatcacaccagcaggtatctactatagaagagatatcgcaaaagaagtatttggaacagatgatcctgacgaagttggaaaattattcaaagattatcctacaatcttagagacagcccagacattaaaagacgctggatacagaatcttctcttctgatgcagagatgaacgtattctccggtgacagtgcatgggtagtagatggaacattaaatgtagaccagtccagaatcgattatatggatctttgtgttgacttatatcagaatgatttgacagcatatgcaaaccagtggtcaacaccttggtatcaggctatggctggcgaggtacctatcttaacagcagatatccagtcttatgcagatgattctgttaacgtatgggatgcagatcagttcgcagaagcaactgaaggacttgacacaacaacagtattcgcatttggtcttccttcctggggcgtacttacaatgagagataacgtaggtgaaacttccggattatggggcgtttgctctggaccagcagcaggatttgacggtggtacatatattggtatttcttcccagtctgaaagaaaagacactgcatgggaattcataaaattctgtacattaaatgaagacacagctgactggtggatcgattactcacagggtgatacagtttccttaaaatcagctcttgagaaacacaaagatgatgagaaccagatttatggtggtgagaaattataccagttctggttagatcaggcacagtacattgatacttccaaagtaacaagatacgacaaaggtatcggcgatgcctggggaaatgcagtctccgcagttaaaactggtgagaagacaaaggacgaagcaatctctgatttctacgatacaattgaagcaacttatccagaaattacagtaaatcgataagaagcatattcgttctgaacaaaaagagaaactcttaaataaattagattaaattgtggagaattgacaaaagcttgttttgttaattcttcacaatcttctcaacctgaatcagagtttcacaattacctgtaagaacgaacaaggaagaaggagaatggcagaatatgggaaagaataaaaatggtttgaaaaaatatgataacgtgggatatctctttgttttaccatttgttattgtattttgtatttttagtgtttatccggtattaagaaccttatatttcagttttacaaacgccaagatcgcaggagtcggcgtgacatcctgggtctggtttgataattacaagcgtgtactcacagataaatttttctggagagcgctttggaacaccgtaaggatctggggtgtaaatatcgtgttacagctcggacttgcatttttacttacaattgtattcagtgatatcaaatacaaaatcaagggacttggagttttccgtgttatttattacttaccaaacttaatcgcagcaacatctgttgcatttttatttcagacattattagattggcgttatggaacgtttaatcagattattgcatctatctatcggttatttggagcaagctacaatccgattgactggcttggttcttccgctacagcaggagttaccattgcagtgatcagttcctggatgtggtttggaaattcctttatcatgttaatggctggtgtgcagggaatctcaaaagattattttgaagcagcagcaattgacggagccggaagatggaccgtatttggaaaaatcacattaccattattaagaccaatgttactctatgtagcgatcacatcattgatcggtggtttacagatgttcgacctgccatatttgatgtcaaatcctgctggagcatcttataactccgtatacacagtggtaatgtatctctataaatttggatttacaacaggaacaacccagacaggttatgcatctgcaattgcctatgtattattccttatcatcttagcagtctctgtgatccagttgaaagtgtttaacggagacgaagaaaaagctgcatcccgccgtgctaaaaagcgggctgctaaaagcaaataaggaggaacattatgaacggcgttggatataaagtcaaaaaaacaattttatacatattactaatcctgcttggtgtcatctgtatgcttccattcctgcttatgatggtgaatgcgacacgaagcggtgcagagatcatgaaatcatttacactggttccaagtacacatttaaaagataactgggataccgtatttaaatatttcaatctgttcttaggtatgtggaacagtttgaaagtagcaattccatcaactctgctctgtgcatatttctcagcgatgacagcatatgcactggcaatgtacaaattcaaaggaaataaagtattattcatgacaatcttaattttcatgatgataccgggacagcttggactaatcggtttctacaatttatgtacaaaactgcatctggtaaactcctacattcctctgattattccggcaattgcgtcaccgggaacggtgttcttcttaagacagtatgtactttctgtcatgccgccttccctgatcgaggcagccagaattgacggagcaagcgagttatatacattccacagaattgcaatcccaatcatgtcacctggaattgcaaccatgagtatcatgggattcatcggtggatggaatgcatacctgttacctatgatcattttaaataaaaacgagaagtttactttgccggttatgatggcaaccttaaaatcttcgaccgatattaccgcaaatcagggtgcgatttacctcgcagttgcaatttcggttattccgattttacttgtatttgcattcttctcaaaatacatcatcagcagtatttccgcaggtgctgtaaaagaatgatcatagtacataacatagcctttaccatattcttctctaaatagatataagcagaaacgctactcaaaaaaattgggtagcgcttttgcgcgtttaagattcattgcggaaaaaggggaaaaatggtatgataaaaagtagttggaatgagaaaaaaggggaagtttttatggttatggatagaatcagaaaaatgcttgcaggtgttttgataatgacactcgtagttggtatgacagcctgtgaaaccgggcaggaaggacaggttacagacatatccacagaggcagaagaaagtacacagagtgataaagattcccctgcgtggaagacgtatgcgaaagaacctgtcacgttagactggtatgtcaattattcgtggtttgcaacgccgtggggagaaaatgcagtctcaaaaaaaatcaccgaggagacgggagtgaacatcaattttattacgccgatcggaaacgagacagagaaactgaacgcactgatcgcatcggattccctgccggatctgatcacattaggttattgggaaccgcaggtgaaggaaatgatcgaaggcaatatggtctatgcgttgaatgaacttgcagatgattatgatgcttatttctggcaggtcacagacgcagatattgtgaactggtatacagtggatgatggcaatatctacggatatccgtgttctacgatcacaccaaaacagttagaagaacacgacgacatcacttccaatcagacgtttcttgtgcgcaaagatatttatgaagcgattggaagcccggatatgacaacgaccgggggctttaaagcagcagtggaaaaagcggcagagatgttcccggaagtagacggagaaaaaatgatcccggtgggggcacatatttttgacaatcagggaaatgtttcctttgacaaatatttaatgaactttctggcaatcccgtgggaaaaagacggcaaatactatgaccgctatacagacgcagaatatgtgaaatggttaaaaatgttccgggaacttggtgaggaaggactgcttgccaatgacatctttgtggatacaagaacacagatggaggaaaaactggcacagggaagatatttctgtatgctgtatcagtacagtgatatgctctcccagcagaaagcgctgtatgagaaaaatccggacagtatttatatggcggtggagggaccaagaaattctgcgggcgatgatccgacactgccgatcagtacaatgaacggctggacgcttacgtttgtatccaaaaactgtaaaaatccggagcgtgcgatcgcatttatcgattatatgttaagtgaacatggtcagatgctagtctacctcggagttgagggtgtgacgtatgatatggttgacggaaagccggtgttaacagaggaggtcagtgaaattttaaattctgaccgggagacttatgacagactttacggtgcggatgacgcctactggatgttccagaataatgtaatgcagttacagtggaagcagaagccgagtcctgcaacggcgcagctgattgagtgggcgagcaaatacacggtctataatggtcagtatgatgtggctccttccatgaacccggatatagcagcactggatgacaaatgcacaaaactgtggagtgagacgcttccaaaactgttgcttgcaccggataaggcgcgatttgacgagatttttcgggagtttgtggaaaaaagagacgccatgggctatcaggaggttttgaaagagaaaacaacacttatgaacgctgcaaaagaaaaaatgggaatgaacgaatgaaaaagataaaagagctttttttgaatacaaagttaaacatcaaatttaccagtatgatcattctgtttatggtgattcccatagggattttcgcaggggttttgttttatgtaatggaacagaatgttgtgaaggaaaatatggactacatggattatatcatgcagagaaatcaggacggtattaaaacaaagattgattccattaatatgtcgacgcagttttttctgagtgatgatgcgatgcttcagatgttgaatgcagctgctgtgggaaaagaagtttcaacaacagactggctggactttaaaaacagcgaagtgtcagccttagagcggttagtgaacaataacccactgctgtatggtgtccgcgtttacgcggtcaatgacaacgtgcaggagatgatgccgattttatataatgcatcccgtatgaaaaagcaggagtgggcggagcaggactcgtatgtcggctggaattttgactataacgacaatcttttccctgcctatacgatgaatcagaaccggaagatcatttcgcttgtcacgccgattcttgacagtgacaatggaaaaatcggcgtgatcgaatctgccatgacaatggagaatatgtttccaagtctgtatgagggaatagaggacgagtggagttttttctattcggatgccggagaaacttattttggagaggaagaacaggcggaatcgcaggcattattgaatgatattttaaagcagtgcccggatgaggaaggtatccagacgatttaccagaaattagacaaaaggaaccttgttctttcctatatgccggtgcgggagctttccggcacgctgatctgtgtgaaagacatcacaaaaaatgtgcacaacgtatattttatgcgtgatgtatttgtggcggtcatgcttgcctttatcgtgttacttgcatttgtgatcaaccggatcgtggaacatctgttaaaacagttttacgagatcttaaaatcaatccgtaaagtgcagaagggcgatttagatattgtgatcgaaaactgcggcaaggatgaaatgggggaacttggaacacagatcaataaaatgcttgagcgtatcaaggaactcatggaagataatttaaaccgtgagatgcttgcaaaaaactcagagatccgtgcgttgcagaatcagatcaatgcacattttatttataatgtgttagaatccattaagatgatggctgagatcgatgaggaatacgccatttcggatgctgtgacagcccttggaaaactgcttcgctacagtatgaagtgggtatccgggaatgtgcttgtggagcaggagttagagtatatcaaaaactatatggcattgataaatctgcggtttgattatgagatttatctgtcgctgaatctgccggaactggtattaaaacaggaaattccgaaaatgtcattgcagccgatcgtggaaaatgcgatctatcatggcattgagcagatggcagaggataccaatatttacatcaaaggtattttagatggggatgactgtgtgatcgagatcacggatgccggaaaaggaatgtccgaagaggaagtggagagactccggttgaagatcgccggaaaaattgattcaggtggtggctccggcaatggaatcggtcttaagaatgtgcaggatcgtatccacattgcgtttggggagcagtatggaatcgagatcgcatcaaagttaggatgctatacaaaaattatggtcagaatcccaatcacacacagaagccagacagacagcgagttagagacggcagaggcagaaaaaatttgagaaacattgtaagaaaagagaagaatcagacgaggtttaagaagttatgaagacagttttgatcgttgaagatgagaaaatgatccgtcagggaatcaaaacaatgattatgcgaagtggtgtaccgattgaggtcattatggagtgtaacaatggagagactgcgcttgaaatcataaaggagcaggaaatcgatgtgatgtttaccgacatccgtatgccgaaaatggatggcatcgagctggttcagaaaatgcaaagctgtgagcatattccgcttacagtggcgatcagtggttatgatgatttttcctatgcagtggaaatgttgagaaacggcgtgcgggaatatattttaaagccgatcgagcgggaaaaaatcacggaaattctgaaaaaactgaatgcagagattgaaagccacaaagaaaaagaggaaaacaatcagaagatcggctatcagcagatgcgtcatctcatgctttccggggagctgaccgaggaagagcagaggacgatcgaaagacagtatgcaggtcatttttataccggaaattattatgtctgctgtcagaatcaggtcaggagagaggaactgtccgaggacaactatattttcatgaagaacatgaacggcgacgatattttcatcgtaccggcagaaaatctggcttttttattgaaaaatgagttacaggacggttacgttggaatcagtgatgtgcactgtggattacagagtatccgtcaggcgtacatagaagcggctgcgatgcggaaaaaagcatttgtccgcaataaagtggaagtgcagtatggcgcatttcaggagaaaatcccggaaggtctgatcgcagaggcagcgaaactgacggatgaaactgccagaatccagcgtgtgcagctgattggaacagatcataccgaggaactggaaaagagtttttatcagttcttttacgaagtgaaaaatggaagaatcgacgagaaaatgtttgaaagctgtatgcaggatttcttcgcagaagtcgagaaaacgtatcagaatgcattggaatccgagggagaactcttatcagaatgtaagaaaatctggagtgggaactgcattgatacctatgaggaacaggtaatagaatttgtgctgcatctgcatgagaagatcaacagtacttatgaccagaacaaaaatgtgcagaagatgaagcttgcagtggagtacatcgaggaaaactatgcaaaagatctgaatatggcagttgtctcgaattatatttccatgaattattcgctgttttcctattcattcaagcagtatacaggaagtaattttgtgaattatctgaaagatatccgcatgaaagaggcaaaaaaactcctgactgaaaccgatatgaagatcgtcgagatcagtcaggaagtcgggtatgacaatgaaaaacattttatgaaaatttttaaagctacctgtggggtatctccgaccgagtaccgtcacaatacttatctgtctaaatcctgatgaaaaatctctttttgttgatacatctgttcatcagccatagaaaataaggccttgatgtcttccttagtcagggaagaaccgggagcggactgggcgtaaccaccgcttgcggagattgtatattctttgtggctcaatttattataattatccaagtacttatagacgcgggtgagaagttcatctgcgtcttcttttgtgtaatccattgcaagcaggtaaaattcatcgccgctgaaccttgcgcagatatcggttgggcgggtgacgctcgataacgcatgtccgatcacctgaatcgcaaagtcaccttcattgtgaccgtagtggtcgttaatgtatttcaggtggttcagatcaaagaggaagcaggtgacgatactctttttttctgcagcttcggataaaagaatcgcctcatggtgcagatagccgtgtttgttgtaaagtccggtcagtgcgtccttcgtgtaaatgtcctctaagtgggagacaagcagggaagtacgctttgcatcacttaaccgttttaataactgacggatattcataaaccagtgcacaagctggaaatggtagtcaatgtggttgttctcataagctaaggtaatgtaaccaaaaaccttgttctggaagaacaatggaaaataaaggtaagcggagtccgactgccgatagatatgctccggcagaagggaacgcttggtaaaactgcattccgggagccgttttccgtcttttaagcctaactttaacagaatctcatcgggatttgccggaaggtcatcttccttttccgtgagctctaagatatgctgggagacactgtcccagtttgcgtagaggcacaggtaaaactcggagcagtttggaatggaatgcacataattttccaacagatccatagcttcgtccagatcagaaatattttgaaattcagcagacattttcatggagcctaaaatggatgtttccagggaagcaatccggttgtttaatttctgtgcaaaataaatggctggagtttcctttaaatggctgcatccacaggaattgctaattgtcatctgcgcgtgtacttctgtgacaaaaggaacttcttcctcatgcagaagcttcatcagtttttctacggaagcctctcctaattcatagaccgggaacgagacggaagtaagagaaggcgtaacattctgtccttcttcgctgttatcacagccggtgatcgcaagatcttccgggatgcggtagccggaagcaaccgcggctgtcatcagcaacagggcaagcctgtcattatagcagacaaccgcatccggctttgtcccgctttcctcaaaaaagcggagtgcttctgcggcagactgcgcagtgtatgttccggtatagacagagtgggtgtgcggtgtgacattatatttttccaatgcgttcctgtaaaactgttctctggaatcagagaaaaatttttcatcggcacatccaaaatagcagatatttttgcagtgatgttccgtaatgagatgttcggtcagatcgtaaaatggtcggttgttttcgagggagacggcaggaaaatgctggttgtagacttcgatttccacaaccgggcaggtacattttgtttttaatgtgtggtaaatctgttcctttaactccgtgagcggataagttccggacgcaaaaataacaccgcttagatcatcaaaattcggcagtgtcaagatgctttcctccccaagactgtaatcgccaagattctctccgtccatggatgcaaaaatctcagcggtgtagccgtattctaaagctttgtcgataattccctgacagacattcttctggtaaaaccccataatatgggagatgaaaatcccgatttttttattgtgatacatgataaaaaccccttgaaagcagtctgcgtaagaccgctttttcccttaaaaatataatcttattgtacaaaaaaataaaatgttttacaataggaaaaggctttacgaaaggaaagaaaaacatgatacaggatattgctccaatgaaactggataatgtatacaaaaggaaaacaccacatgcgggaagcaggatgttaggatttggcgaccgcactgtgtttttggaatataacggagaagtgcagtttttaacatatgagcagtggaaaaattataacgaaacagtattgggacgggaagtaccgccgtgtgtctatcttttttcggtgggagaggaagaatattttctgacggatatcggggaagatactaagatgggggaattttgtttttataaaatgtttgatgtccgggcgatgcagccgaaggagtgtgtgctcgtggcagtgactgcgtggcatttgtacgtctggtacagagacaatcagttttgcggcagatgcggggagcgattggtgcacagtgatgtgcagcggatgatgcagtgtccgtgctgtaagaatatggtatttccgaaaatcgccccggcggtgatcgtcggagttaccaatggagatcagattctcatgacaaaatatgcgggcagggaatacaaaagatatgcgctcattgcaggatttacagagattggggagactgcggaggagacggtaaagcgggaagttatggaggaagtcggcttaaatgtcaaaaatatccgctattataagagccagccgtggggatttgacagcaatctgctgctcggatatttctgtgagcttgcagacgagcgggagatccggttagacgaggaagaactttcggtggcggaatgggtggattatcatgatatcccggaggataaggagaagttaagcctgacgcatgagatgatgacttattttggaaagaaaaagtcagagggaacatgggacagtgcatttgcaggactttccggaacacaaaagaatggatgaaaaagaacttatcatgagaaaatggggataaaagaatgacagcagaaattctggaaaaattacaaaagatcacgccggaggaacagcgtattttatccggggagaagaccattgaaaaagaaatctacatggaagaaaactcgaatgtgatcgatgccacgaagcttttggaagctggaaaactgatccaggtgcggacacacacaaggtttgtgcatttcccggaacacacgcataattatgtggagatgatctacatgtgctctggcagcacacaccatgtcatcaatggggaagatgtgattttgaagcagggggaacttctgattttaaatcagaatgccgtgcaggagatttatccggcaggagagcgggatgtggcagtgaattttatcattcttccggaattttttgactatggacttaaaatgatagaggcggaggaaaatcagttaagggattttattgtggattgtttgcgtggaaacaataattcggcaggatatctgcattttaaggttgcagatgtgcttccggtgcagaatctgttagaaaatctgatctggacgatcgtaaataagcagccgaacaagcgcagcatcaatcaggcgacaatgggactgctgtttttgcatttgatgaatcatatggataaaatggagacggatgctgccagtgagcagcagaaactgatcattcaggtattaagctatgtggaagaacactataggagcggggaactgaccgagttggcagaggaactgcattttgatatttactggctttccaaggagatcaaaaaaagaaccggaaagacctacacggagcttgtacagtcaaagcgcttgagtcaggcggcgtatctgctccgcacaactgcaatgaatgtcatggatatttccatggcagtcggttacgataacatcagttattttcatcgtatctttcagaaaaaatatggcttgacgccgcggaaataccggttgcaggagtaacatatgcaaaaaagccttaagcgtggcttaagactttatgtgcatctgccggtattttgtcggagagatgccggtttctttctgaaaactggaaaaaaagtaactgcggctgctaaaagataactcgtcactgatttcctgaatactcatttttgtactgcatagaaggagctttgcttcttctatttttttctgccggatataattgttgacactttttccagtcacttccttgaacttatgggaaaaataatattccgtgtagccaaggcggtcagagagcagtgcgatagaaagcggttcccggatgtgaagactgatgtaatcacagatattctggatttgtctggaatgttcatctgtctctttcgcggcgcggactcttcggacatagtcatctaaaaattcacggcttaaattggttgtgtcagcggtggtcttacattcttcaatccgctttgcatagtagtcgtttaacgtgtatgcagtggaaggattaagaccgccctcaattgaggcacgactgcacagggtgagaagcacgatgaggttatttttgtttgcacgcagggtatctccgagctccgctttcacaccggaacttaaagtcatagattttccgagggctttccggtagtttatgtttccctcacgaatcatagatagcaaggtctgctcagacatccagattcccggatgctcgtccgccggaagcgtacgttcttcggtatctttcgggtcactgtgtgaggtaaaggagatcatatcggcagatattttttctccggtgatcgcacagtgcagcatgactgcgtaggagagcagtgtggaagacgggatgatcgggacgctttcaatctgttttacaattttagaacgaagcttgaccgtaagctggtaggaatcgagctttttccgcaggatcatatgggaattactgccggaaaatgccggaccaataatgtggctctgctttagttcaaatccctgatattcaaacccggcgatccataataagccaaattcggtgtctaagatcaggggaaggcggttgccgcttcccgtgtgggagagtaccagagaagaaaatccaagcatggatataatatccggctgcataagctctgccggacagtccgtttcgatcagtttgaaattctggtcgtacttccagagatgcagcgggtattcgcactgtatcatttcctgaaaaaatctgagacgttctgtgatattcatgctggttttctccttgtcatattttgttaattcttcacaatcttcataatctgaaattgagttttgcaatgatctgttttatttactggttccagtgtccgaggaaggataaactttcctttggatgacgtgtctgtgtggtgcggtcaactgcgatcagtccaaaggtcatggagtagcctttctgccattcaaagttatctaaaaggctccagtggaagtagctttttaccggaagaccatctgcaatgcaggaggcaactccctttaaagcagtgtcaataaaggcaacacgtctggtatcgtcggctgtggcgattccgttttcggttacatagaggtcgccgtggaaatcttttgcaactttacggatgacatgctctaaagctttgggataaaattcataattcatctgggtaagttcggaaccttccgggtttggaagctgaccatccggaccaatcagggagcgcgtataattttgtacacctaagaaatcatcttctttgatatatggaagatagtgtaaaaattcttcatcccattcttttttcgcgcgttcttcgccgccttcctgcggttggatatcatgaaggcttaaagtaagtccgactttgatatcaggataaagggctttgatttctttcttcgcaagttcgtgggctttcataatcagaaggtctccgtttggtgtgcgcatggaagtgaagttttcgactttttccacaccaaaaatttctttattttctatggcagttgctttctgaccttccaacatcttttctaagttgattccaacctgaacactaccgtctgtgctgctttttccctgagatgcagactgcatctgcatcatcatctgccgtttgtagcgcgctgcaatcgctgcaacctggattcccatgtttgcttcattgatcgtgcagacgtagtggagttcgtttccaagttctcctataatatagtgaacatagtgtgcaaagtcagccggagttgtttcggcttcccagccgccttttgttatcagccattttggactggaaaaatgatgcagggtgacaaatggttctacaccatattttttacagcaggcaatgacatcgcggtaatgatcgaccgcatctttatcaaaatggccttcttccggttcgatacgcgcccattcaattgaaaaacgataagcatttaaacccgcatctgctaaaagccggatgtcttcctcgtagcgggtgtagtggtcgacagcatctaaggatggctctaaaaagctggtgtgcttcatatgttccattgcccagagatcgctgtggatgttgtttccctctacctgatgtgctgcggtggctgctccaatcaaaaaatgttctggtaatttcataaaattttctcccttcatggttgcattacatttagagaatgcgaaacgcctcttaatctctttaaatcgttcaaaattaacaaaaatattcaagacacgctctcgctacgtgtcactcggagcggtacagctcattcttcgcagtacttcgcaaattcatttctaatctgcttcgcagataggaacttgttcgatttttgcccccagtgctttttctgtcttttgccaatttttcacaatttgatttaggtttgcatacgtttcacagttttctaaatttctttacattaataatataagattttatgaaattatatgtttgtaaactcgtgaaaatgttagaataatgatgtaatataattatataacatgaattttattacatatacgtgaatttgtaaacacatgaatagaagatagaggttagaataaagacatcaacaaagacaaacgtattggaggaagaaaagatgtttggaaagaaaaaacagcaggtggcagaaactagtggagttacatatcgccgggctaagacatggagaattgcactcgcagggtgcagctcaggaattggaatgtgtttttatgtattgttaggattggcaagttatgttgcaaacgaaggatatggaattgcaacagcggtcgttggaattatcctgacggcaacaagaattttagatggtgtgaccgatccaatcattgcaatcgttattgataagatgaacacgagattcggtaaaatccgtattttgatggcagccggatgggtgatcgaatcactggcagttcttatcatgtattgctgggcaagcggaaaaggacatggaattgtattgtttgtaattctgtattgtctctatattataggttataccatgtgtaatgtcacagcacaaattgttccggcaatgcttacgaacgatccgaaacagcgtccgatggtcggcgtgtggagcactgcatataactatctggtgccgatgatcttaaatattgtgatcatggttatgctgcttccaaaatatggaaatgtatattcggtagagatgttggcagcttcctgtattgtctgtgtggcagtatcaggagtgggactgatcttatgctgcattgcagttacagatattgataagccggaaaactttaaaggcgtcagcacacagaaaaaagcggagccggtaaaagtaaaagatatgtgggaactgatcaaatccaaccgtgcattacagacctttatcgtagcggcaagttccgataagattgcaagccagacagcaagtcaggcagtggtcacaacgatgttatttggtattattatcggcaatatgcagcttggaacaatcctcagtgtgatcggaatgctgccgtctatcgtgtttgcatttattggtgcaaaatatgccggaaagcacggaaacaaagaatcaatggtgacatggacttatgtatgcatgacagtgacagctatacttgtcgtattatttatactgatcgatccgacgctgatcgcgacagcagcgccgatgatgatcgcgtatgtcgtacttactttaatcttaaatggagctaaaatgtgcgttacgatgtcaagcaatgccatgatggcagatattattgactatgaattagacagaagcggtaaattcataccggcagcagtgacaggaacttacagttttatcgacaaactggtatcttctttcagcgtggcaatcgcaaccggactggtagcactgatcggatatacatcgacaatgccacagccatccgatccatccacaccggcaattttctggatgacgatgagcctgtactttggacttccactgatcggttgggtatgtacactctgcgcaatgagaaaaacaccgctctcaaaagaaaaaatggaagaagtgcagaagagcattcaggagaaaaagcaggcagaagtagaaaaagtgattgatgagatgaaataagcagagacaaaaaagtctgaacacagacagaaaatacaggaggaatgactaagatgagacagacgacagtattggataaaaactggattttttataaaaacccggacagtgtggaaggggaaaacgtaacacttcctcacacctggaacgcagtggatgggcaggacggtggaaacgattactaccgtggaacctgtaaatatgcctgcacattcaaaaaaccggagatggatcaaaacggaaaggcttatctggagtttgacggagcagccatgacggcagatgtgcttgtaaacggaacagagcttttccatcatgaaggtggatattccagattccgtgtggatgtcacagaacatttaaaagaacagaatcagttagaagtgctcgttgataattccgataacacaaaagtctatccgcagaaggcagatttcacattttacggcggactgtaccgcatggtgaagctggtgactgtgccggaaaaccatttctgcatggagtatgcaggaagtaatggtattaaggtgacaccggaggtaacgattttagacgccggagcaaaaaaggcagacgcagaagtgaccgtggaactctggatagagggaaaatctgctgacgttatggtgacggtgggagatgagaaaaagagtgttcctgtagagcatggatatgcaaaagcagtgtttgaacttaccaatgtacatctctgggatggcgtggatgatccgtatttatatacggcaaaagcggaactgtctgatggagacagcgtggaaactacctttggatgcagaagtttttccatggacccgcagaagggatttttcttaaatggacgttcctatcagcttcgtggcgtgagccgtcatcaggaccgcgcaggagcaggcaacgcattaacttatgcgatgcacaaagaagatatggagatcataaaggaacttggtgcaaataccattcgtctcgcacattatcagcatgcacaggaattttatgatctgtgtgatgaaaacggaatgatcgtatgggcagagattccatatattacaatgcacatgtcagatgggacagagaatacattaagccagatgagagagctggtcgtccagaattacaatcatccatccatcgtctgctggggactttccaatgagattacggcagcaagcgcagtaaatgaggagctgttggaaaatcatcgcaaattaaatgaactttgtcacagactggatacaaccagaccaacggttatggcagatgtctttatgcttgagacggacagcccgatgttagatatcccagacctgaacagctacaatctgtattttggctggtacttaggggagttagagcagaacgacagcttctttgacgagtatcataaaaaatatccggaccgtgtgattggactttccgagtacggcgcagatgccaatccggcttatcacagcgcaaaaccggagcgcggcgattacaccgaagaataccagtgcatttatcatgaacatatggcaaaaatgatcgaggagcggccatatctctgggcaacccatgtctggaatctgtttgattttgcagcagacggaagagatgagggcggaaaacatggtgtgaaccagaagggacttgtgaccatggatcgcaggttgaaaaaagatgcgttctatttatataaggcatactggagtaaagcaccatttgtgcatgtctgcggcagcagatatgtggatcgtatcgaagatgtcacggagatcaaggtttactctaatcagaaaaaagtaaccctttttgtggacggtgtggaaaaggaaacaatagaaggttcgaaaatatttaagtttgaggttccgattacaggaaaacatacaatcaaggcagtgtcaggcaatctgagtgatgagattattgtgaaaaaagtaacagagccgaatccggattatattttcaacaaacagggcgatgttgtaaactggtttgacagagaagattttaaggcagaccattattctatttccgatacacttggcgagcttgcgcagaatgaaatggcaaacgcgatcgtgcagcgcctgatgtcacaggcgtcacaaagccgtggggatgtggcagagagtgtgaaggacaacccggctctacagcgcatgatgcagcgtatgacattagtcagcctgttaaaacaggcaggagatgcagtgagcgaagaacagatgaaagcgttaaatgatgctttacagaaaatcccgaaaaatcaggaatagcagcaaatggtgctgaattaatacaataaaatcaggagggaacgaatgtgacaagagcaattcagcagattatgcttggaacagtgacaaaaaatgaaaagcagacagcagagacattaaaaagaatcaaagcagccggatatgacggaatcgagctgaatggttttatgattaaaccgacttcttttctggtacggatgctcacaaaggcagccggtatgccggtcggaaagggcggagattatgactggaacacgctcataaaagaggcaggacttactgtgacgagcatccacgaagatcttggcacaatcaaaagagagccggagaacgtcataaaagaggcggaaaagttcggcacaaaatacgttgtcatcacagggatgtaccggtttgattatgccgataaagagaaagtgcttgatttatgcaaagacttaaatgcttccggtaaaatattaaaagaagcaggaattgaacttttataccacaatcataacagcgaatttttgaaggtggagccgggaaaaacagcgtatgatctgatccttgcagaaacagatccggcttatgtcaattttgaactggattcttactggccgacagaggctggagtcaacgcacttgaattgatgaagcgactggatcacagaatgaaactttaccatatcaatgaccgtggaacacgccttacgaagcctgccatgacaccgattttaaaatcggacagcatggaattgggctatggaaatatggatttagtttccatggtggagcagacacaaaaagtgaaggtggatgcggtgattttagaaagccataaaaactgggtggataattcaccattaaaatctatggaactgagtgcggagtttttgaaaaagtatatataaccgttcaaggctgggataaaaatgaaagaaaaaataaaagctgtaaattgcaaaacagaatatatggaaaacccgattggaattgatacaccagagcaattgctgcaatggcagtgtgaaaactgcaattaccagagcgcataccagatcgaattgtatcgcgggaaacaattattttttggcaccggaaaaatcaattcagatcagatgcagtatgaggtgcagcagaaactttcttccagagactgtatcacatggcgcataaagctgtgggatgagaatggggaagaaggagattggagttcgcttttttcctatgaaatgggtctgcttcaggtggaagactggaaggcaaaatggatcgagccggagataacactgtttgaagaagctgatacacattgtcaggatgcgatgaaccgtcttgcaaaaagtgcatggaatgagcagaaacataagaaaaaagagcagtttctacctcatcagccggcgagctatctgaaaaaagaatttaccatagagcagggaaagactgccagactttacatcagtgcacacggactgtatgaagtttttttgaatggaaaaaggattggaaacgcagtcttaatgccgggaagcagtaactattattatgaggtgaaatatcaggtatatgatgtcacagaactgcttaagaccggaaagaatgagattgagattttgttgggagacggctggtatcgcagtacctccggtgtggacggcgacagagacatttatggagagcgtcttgcggtcatcgcccagttagaagtagaaaaacagatcgtcatgcagacagatgaaagctggcttgcgtgtcaggacggacctctggcacaaaatgacatgcagcagggcgaagtgtatgatgcaaggagagaggctgtctaccgaaagcagacggaatactggcataaagtgaaggtttccgaagaaggctgtgagaagcttgttgcagcgaatacagttccaatcacagaaaacgaaagctttgagggaaaaatttttcatacaccaaatggtgatacggtggttgatttcggacagaatattgcaggttatgtggagtttacgatccatgcaaaagaaggtcagacaatcacgctctatcatggagagacattagatgaaaacgggaacttcaccatggaaaattttgaagaccgcaggcgtcataaagaaaatggcgtttaccagatgttacattatacgtgcaaaaaaggcgtgaatcattacaagccacgttttacaatcatgggattccgatatgcgaaagtggagaccgatatatcgcttgaacaggcagtatttgtggcgcatgcagtgtattcggacatgcggcagacagcagagtttacaagcagcaatccattattaaaccgtcttgtggaaaatgcagtctggagccagaaaggaaatttctgtgatataccaacggactgtccgacaagagaacgcgctggctggacgggtgatgcgggactttttgtaaatacaggtctgatgttaatggactgttatccggtctaccgccactggttaagacagtgtcagtacggacaatacgcagacggaagaattgcaaatatcgcaccaccgaataaccgtccgggatttatgagcaaaatgctttcggcttcggttggctggggcgatgcgtgcatcctgattccatatgcaatgtacgaacgtttcggggataaacgtattctggaagaaaactatgacatgatgaaaaaatggtatggttttctggaaaaaacagcacggaaaaagagcctgaaacatttcttttccaaagggaaatatcgtgcatacataatggagtccgggctaaactacggagagtggtgcgagccgggaagcaatccaatggagagtatgagaagcggcaactatgatgtggcaacagctttttatgcctattccggaaagctgctggctcagatcgcggaaattctcggaaaatcagaggacgcttcctattatgccaaaatagcggagaatacaagatgtgcatatttagaagcttttacagaaaatggagcgatcacttcggagagacagtgtcagtatgtccgtccggtacagtttggtctgttagatgaaaaagcagagaaagaggcagtacaaaaactggatgcgctggtgaaaaaatgcgattaccatttgaacaccggtttcctcacaacaccatatctgtgtaaagtgctcgcggaaaacggatatgtagagactgcataccgtgttcttttgcaggaagagatgccgggctggctttacgcagtcaaaaaaggtgcaacaacaatctgggaaacttgggacggaattaacgggcagggcgtgccaaaggaatcattaaatcactattcttacggggcaattaccggctggctgatcgaaggtgtctgtggcatacagtatacaaaacagaagcttgtgataaagccaactgtttcagagcagttagggcatgcaagagcggtttatgattcaccacgcggcaggattgtcagtgaatggtcagtagaggcggataaaatggtttttgattttacgattccatgcaatacagatgcttatatcacgctgcctgacagaccagaagaaaaatacggaccgggcgagtaccggtttgaggttgagagaaaataggaataagttatagtttcttagcataaaccagaaaaagggtacttgatttctcaagtaccccattgcataatctattaagaaagtgaatcggacgtgatgccgatttgccctcagtattaaaatgaattaaagaacagcatcctaaactttgcgagggttggggatgctatttctttttattattatgattatctatgtaagacagagccgcaaataaggacacttttttaaacaaaaggtgttctttttttgtgcctttttacatcctaaaataaagttaaagaaatcaaacaaacgttgtttcacaaagggaggaggacacatggcgcagtattatcttgccattgacattggggcttccagcggaagacacatattaggacacatggaaaatggaaaaatggttttagaagaaatatatcgttttccaaatggtctgatggaaaaagagggacataaatgctgggatacagaggaacttttttctgcaattattgaaggaatgaaaaagtgcaaagagataggaaaaattcctatcagtatgggaatcgacacttgggcagttgattttgttttgcttgatgaagcagaccggatgattggaaatgcagttggatatcgtgacagtcggacaagtggaatggatgaaaaagtatatgagatcatttcggaagaaaaactgtatgagagaaccggaattcagaagcagattttcaataccatttatcagcttatggcagtaaaggaacagaatccggatgcattggagcaggcacagacattgctcatgataccggaatatttcaacttccttctgactgggaaaaaagcagcagagtatacaaatgcgacaaccacacagcttgtatccccagaaacaaaagactgggatatggaactgattgaaaaattaggatatccgaaaaaaatctttcagaaaatcgaaaaaccgggaacgattcttggcaatctgacagaagaagtgcaaagggaagtcggattcgactgcaacgtgatccttccggcaacgcacgataccggatctgcggtcatggcggtgccgacaaatgaggacaataccatttatatcagctccggaacatggtcattaatgggaacagaattaaaaaacgcaaactgttcaacggaaagcaggcttcacaatttcacaaacgagggcggttatgattaccgtttccgttatctgaaaaatatcatgggactctggatgatccagtccgtaagaaaagaactggcaccggaacagggattcggagagatttgcgaggcggcagcaaaaatgaatatcagttctttagtggactgcaacgctgaccgatttttagcaccggaaaatatgacaaaagaggttcaggcagcgtgcagggagagcggacagaaagtgccggaaggaattgccgaagcagcatctgtcatttaccggagtcttgcaaaatgttatgcagacacaattgcagagattgagcagttgtccggaatcacatatgacagtattcatattgtgggcggtggagccaatgcagcatatttgaatgaacttaccgcagaagcaaccggaaaaacagtctatgcaggaccaacggaggcgaccgcaatcggaaacctgaccgcgcagatgattgcagcaggagaattagctgatttgcaggaagctagaaagtgtatttttgaatcatttgaaatacggaaatttgtagataagtaaatttgtttttatgagaagcaaaccaaaaaattttagcagcagaattatatagaaagctataaataagaaaaatgattgtatacaaatcaggaagggcaaggtagaaaaaacaatgacaacacagcaaagatacgaagcggcaaaacagatgtatgcaggcatcggtgttgacacagatgcagcaatcgcaaaattaaaagaaatcccggtatcccttcattgctggcagggcgatgatgtgactggatttgaccatgacggaccattaacaggcggaatccagacaaccggaaattatccgggtaaagcaaagacgccggagcagcttatgcaggatatggaagaggcaatgagccttatgccgggcaaaaagaaattaaatcttcacgcaagctatgccatttttgaggagggcgaatttgcagaccgcgataaactggagccaaaacatttcaaaaaatgggtggattttgcaaaaaaacacaatgtcggaattgatttcaatccaacatttttttcccatgataaagtaaaagatggtcttaccttaacaagtccggatgaggaaacaagaaaattctggatcgagcatggaaaagcgtgcatccgtatttcagagtacttcgcgaaagagactggtgttccatgtgttatgaatatctggatcggcgacggatacaaagacattccggcagaccgcatgggaccacgcatgagatacaaagattccattgaacagatcattgcagagccgcatgatccaaaacttgtaaagccatgtgtagaatcgaaagtatttggaatcggtgtggagtcctataccgcaggaagcgcagagtttactttaacttttgcagcaacacacgagaatgtacttcctttaatggataacggacattatcatcctacagaagtagtgtcagataaaatttcggctttactctgttactttccggaaatcgcacttcatattacaagaccggtaaggtgggattccgaccatgttgttttatttgatgatgaaacaaaagaaatggcaaaagaaatcgtaagaaacgatgcaatcggccgcgtacatatggcacttgattattttgatgcaagcattaaccgcatttctgcgtggacagttggttttagaagctggcagaaagcattattatccgcactttgcactccaaatgccgaatttaagaagttacaggatgaaaacagactgacagaacttatggtaatgcaggaggaattaaagacatttccgtttggagatatctgggcagagtactgtgcggaatgtggcgtgccttctgatagaagctggtttgcagaagtagaaaaatacgaaaaagaagtattgttaaatcgttaagtacaatcgagaggagatttataaaaatgaaagtattagatgcagaatttgtaaaaggatttatccgcatggcgaacgatggctgggagcagggctggcatgagagaaatggtggcaacctttcctatcgtatcaaaccggaagaagtggaatcggtgaaagaaaattttgaagtaaaagagtggcagccaatcggaacaaccgttccaaaactcgcaaaagagtatttccttgtcacaggaagcggaaaatatttccgtaatgttatcattaaaccagaagattccatttgcatcatcgaattagatgaaaagggagaaaattaccgtatcgtctggggacttgtaaatggtggaagaccaacttctgaattaccttcccacttaatgaaccatgaagtgaaaatgattgcaaccggtggaaagcacagagtgatctatcatgcacacacaacaaatatcattgcgcttacctttgttcttccattggaagataaagtgtttacaagagaattgtgggaaatggcaacagaatgtccggttgtattcccggaaggtgtcggcgtggtaccatggatggttccgggcggccgtgatatcgcagttgcaacgagcgagttaatgaaaaaatacaaccttgcgatctgggcacatcatggaatgtttgcttccggagaagattttgacctgacattcggtctgatgcataccgcagagaaatccgcagagattcttgtaaaaatgttatccatgcagccaaataaacgtcagacaatcacaccggataacttccgtcatcttgcaaaagattttaatgtgacactgccggaagaatttttgtatgaaaaataaatgcagcatatgagagaatactacaaatgaatttaaaaataaggcgtatgaatactatggcactataactataacattcatataccttatttttttacatcttacctgccgatttatgcatcttacatagcagcaggtagacttctattgcgaaatcatatataagataaataggaacataaactaaatcagaatgtgaaagaacaaaggataaaattatgatcgaatatagcaaactgcaaataggatgtatgttaatcgtattatatgcagcttttatttgttatcgggaacggtatgcatacaaagtaaaaaagaaggaacccatttttgaattactgatttatatgggaatcatagagatcgcatttgacggcataacaagctgatcacgattacaacctgtattgctgcggcgatagcagtaaccatatatcagatgtatttgatgcagtatcagcgaaaagaaattactgcgattgtgaataaatgagatttgattgacaggtcggttacaggtgtacgcctgatgttgataaagcgagaggagaaggttgaaaaatgagttcagacattattaagatagaacatttgagtaaaagctttggtgatgtaaaagcagtgaatgacataagttttcaggtgaaaaaaggagaattgtttgcgtttcttggtgtaaacggagcaggaaaaagtaccacaatctctattatctgcagacagcttcataaagaccgtggaaccgtgcagattcagggaagtgatctggagaaaatgggtaagaaagtcggaaaaatgcttggcgtggtatttcaggacagtgtgttagacaaaccgcttaccgtcaaggaaaatctgaaaagcagggcagcactttatgggataacaggaaaagtatttgaggacagattgcaggaacttgtagagatacttgattttggagattatctgaacagaccggttggaaagctgtctggcggacagaaaagacggattgatatcgcaagagcactgcttcacagaccacaaatactgattttagatgagccgacaacaggacttgatccacagacaagactgctcatctgggatgttatcgagaaactgcgtgtaaatgataacctgaccgtttttcttaccacacactatatggaagaagctgcaaatgccgggtatgtggtgattctcgataagggaagcattgttgcagagggaacaccatttgaactaaagagcgaatatgttcaggatactatgtctgtctatggtgtgacagaagatgagataaaagctttaggcagggattataagaaaatcagggacggttatcagctaaaagtgaaaaatacatcggaggcaaccaggctgatcgtagagcatcaggagttgtttcgcgattatgaggtagtaaaaggtggaatggatgatgcatttcttgcggtaacaggcaaaacattaggaggtgagcactgatgaaagcagtattggcattgatgagcagaaacagaaaactatttttcaaagataagggaatgttgttttcgtcattgataacccctgtaatattgatcgtattgtatgcaacatttctggcaaaggtgtacagggattcctttgtgacggcaatctctgatctggtgacagtttcggataagctgattgacggaaccgttgcggcacagcttgcagcagcacttttggcagtgagctgcgtgacagtaactttctgtgtgaatcttacgatggtacaggatcgggcaaatggcacgagaaaagattttaatgtatcgccaatcagtaaagccagcctgtatctgggctattttttgtctacagtggttgattccctgatggtgaacggacttgcgcttgtattatgtcttggttatatgtacaaaatgggatggtatatgagtgcggttgatgtgctctgcgttattttcgacgaaatattattagtactgttcggaagtactttatcaagcattatcagttacccattgacgacacaggggcagttatccgcagttggcacaattgtaagtgccggttatggatttttatgcggagcttatatgccgatttctaattttggcagtggattgcagaaagtgctgtcgtatctgccaagtacatacggcacttcattgctgaaaaaccatatgcttcgcgggatatttaaagagatggaacacaatcatttaccggatgaaatgatcactgcaatcagggatacactggattgtaacccacagtttcaaggttctgtggtaagcgtggatcagatgataatgcttatggttggaagtattgtggtatttggcatcatcttcttttgcatgacatttcttccagagaaagagaataggtgatgtaacattgatgcaactaaggcgtttaaaaacataaaacaaatatccagttatcaatgcataaaatgaaaaaatagcaaaaaatgtattgatatgataatctgattttcattttgtcagatgattcagcagaacagatacgagaggcaataggacagccttctgaaaatctggaacaaatagaaatctataaaaatgtgatattctggacgtttgacataaacaaatatcaaaagtgcaactggtggaaaagaactgccgaaaatggcattgcggaaaaactgaccataagaactgcgaatacagtaaataagcttatatagctggaaaatcgaaattgtaggagaaaaagttaaaataacgagaatacactaagacgcaggttttagaatgaagtagatatatatgatgagacgatgataaagtagagggaacaatcagtggatctggttgattttggggttagtgtgaaaacagccgctgatatcaaccagttaatcagaagccgcagaaaaaacgatactgtgcagtgatagtctttatgcagttgatgataaaaggtatggtttatagataaaaagatgaataacaggagtttctattttctggtaactaccttttaactcttcctttatagccttctcatcattttttattgtcaatagacgtttcctgagcagttctccggaattggtaagaaaaaggcgtttgttttgataaataaagagagatgtatcgtatgcttcctccagaaagtgaatatgctgggatacagcaggttgggtaatgtttaattgttttgcagcagtggtaaaattcattgtctggcatactgtgaggaatgtttctattctaaaatccagcatattatgcttcttttaacgataaaaataatttatgatttaatattattatataattttacattatgaatgtttagcgatatacttttctcattaagaagaaagcgaggttaatacttaatgaattttatgaaaagaaattggagtggtattctggtttgccttgtgatagcaataccgtcatggatattgggaaagatatttcccgtaataggcggagcggttatagcaattattgctggaatgattgtcacaatgttctggaatgacaaaggaaaggcagaagcaggaatcaaatggacatcgaagatgatacttcagacagctgttgtcctgctcggatttggaatgaatcttggcgtaatctttcagacaggaaagcagtcattaccgattattgtatgtacgattacaacatctcttgttattgcctggatactgcatcgattacttaaagtacatacaaatacagctatacttgtaggtgttggatcatctatctgtggaggttcagccattgcggcaacagcgcctgttattgatgcagacgatgatgaaatagcacagtcgatagctgtaattttctttttcaatgtacttgcagctatttttttcccattacttgggaaggcaataggatttgatactgtaaatggagaggcgtttggtatttttgcaggtactgcaatcaatgatacatcatcggtaacagcagctgcatcaacatgggacagtatgtggaaccttggaagtgagacattaaataaagcagtaacagtaaagcttacaagaacacttgcaattataccgattacatttggattatcattgttacaggctcgaaagagtgttaaagcaggaaagcaggctgcaaagtttagcctgaagaaagcattcccgatgttcatattctattttgtattagcagcaatttttacgacagtctgcgtacgtatgggaatggatgtggaagtatttcaaccagtaaaagaattgtctaagtttttgattattatggcaatggctgcaattgggctaaacagtaatataataaagctcattaaaacaggcggaaagccaattgtcgttggagcatcatgttggtgtggaattacaattgtaagtcttgttatgttgcatataatgaaaatctggtaacgtatagttctgatgaatgaaaacaagaataaaccaagaaaacattgtatgtagaactggataatcgtattaccgtgcatgaatatgggcatacgatacagtcgctgatgcttggaccatttatgctgattccgggaatcatctcgattgtctggggaagcatgaaaaagtatgaaagactgcgaaatgagtatggagtaccgtatacattttgctgggtagagagctgggcaagcagacttggtgaaaaatataccggtgaaaaggcaatctggtaattcattttggagcagataacagaagaactatttaaacacacgcagattacgaaaagggatacctatgacaatgcaattagaggagaacacagatgcaggtgtgatatgttttggtatgggtgttaccttaagggacggcgacagagaatatttttatcaggcattagacagatattttccggaaattaagaaaaaatatattgtaacctatggaaatgcgtataatctgccaagtccggataatgagaagcttatggatattttcagaagaagatgcattgaaaatggaatcatttatgatgcaaatgagtgttttcagtatcttcatgcttttcctgaaaaatatgaacaaatgtcatttgtggacaatttattgcaggattcgtagaaaccggtgcaggggatgaagatgaaatagaactttcacagatgttagaaaatatgtgaatcttgaatgattgttttttcgcagtcaatccgctatactatggttaatggtttagcggattatttcttgcataggaaagagcttcctaggcactgggagggtttcatgaacaatacaataaaattgccagttggaattgaaaattttgaagatattcggaaattaggattttactatatagataaaacaaagctgatcgaacagcttttacagaattggggaaaagtgaatctgttcaccagaccaaggcgttttggtaagactctcaatatgagtatgctgcgtgctttttttgaaataggtacggatgagtctttatttgaaggattatatatagcgaacaacaaagagctgtgtgcagaacatatgggaaaatatccggtgatattcatttcactgaaagatgtcaatggtctgttgtacgaggaggcttttgatgccctgacacagatcgttggaaatgaggcatgcagatttttgtttttattagaaagtgataaacttactgagattgaaaaagaacagtatcgtggttttcttaagattaaagacggaaaacatgacatagaaaaagggttagtactttcttcattaaaagtattgtctaaatttttgtcaaaacattatggacgaaaaacaattattatcatagatgagtatgatgttcctctggataaggcattccagaatggttattacaatgaaatggttgaacttgtcagaggattttttggtcaggcattgaagacgaacgatttcctgcattttgctgttttaacaggatgtctgcgtatctcaaaggagagtatatttacaggacttaataattttgaggtattatcgattttgaatgtccagtatgaggaaggttttggttttacagatgcagaagtcagggatattcttaaatattataatttgtcagatcattacccggaggtaaaggaatggtatgatggttatcattttggaaatacagatatttattgcccttgggatgtgatccggtattgtaaaagcctgtgtgcagatccagaggctctcccggaagatttttggtctaattccagtggaaatgcgattgtccgcaggtttatagataaagcagatgtccgtaccaaggatgagattgagcggctgatagcaggagagtgtattgaaaaggaagtttctcaggaacttacttatgatgaacttgaggataagattgagaacctttggagtgtgctttttacgacaggttacctgacacagcagggaagaacggcaagcggcagatatcgtctgtcaattccgaataaagagataaaaaacctttttacaaagaaaataagagagtggtttcgtgatgtgtcccgaaatgacggaaagacgttagaagaattctgcaattcttttattgagagaaaaccagaaaaaatagaacagctttttggcgattacctgtggaatacgattagtatacgggatacagcagttgcaaaggaaaagaaggaaaatttctatcatggcattttactggggcttcttggatataagacaaactggctcacaaagtcaaatgccgagtcaggagtaggttacggtgatatccttgtggaaactccggataatcgaacaggaatcgtgatcgaactgaaatatgctgaggatggagacatgaatgctgcatgtaaagcggcattaaaacagattgaggacagagattatgttgcaaagctgaagcaggatggaatgcgtaattttatcaagtatggaattgcctgctataaaaaggaatgtaaagttgcaattggagaatagaaaaattgaaaataacgatagtggacccggttctgggggaagaggaagagattatattcaaatgccatacgctgacagatgatatgaaccggctgataagcaaattaaaacatggtgacataaagattgccggatacgacacaaatgggatcagtcttttggcggcagcagatatttattactttgagacaattgacaacaaggtatttgcatacggcagaaaaaatgtttatgaagtgaaagaaaagctgtatcagttagaagaactgcttggctcagttccatttatgagagcttccaagtctatgattatcaatcttgacaaaatcagatatttgtcaccggcatttggtggcagatttgaggcactgttagagaatcaggagaaagtaattatttcaaggcagtatgtgccggttttaaaagaacgattagggttgtaggaggagaaagccttgatggagaagctaaaaattcttgtggatattttcgcaaaaattgcggtttgtgtgctgtttgcgtcagcaatttatatttcctcattctggggattagaagcgactatcagtgtacagatactctggcagatcataatcgtttctgcgatatgttccctgccgattttaatgtatccggtgaatggtgaaaaagaattatcgaaaaaaggaatgatcgtacgccagatcatttattttgcctttgtgaactgtgcagttcttggattcggaagggcatttgggtggttttattttaaaaaccccgacatggttgcgtttatggaaatcctcattgttgcagtatatgcagttatgaatctggctgcttatatgaaagaccgcagggtagcagatgacatgaacagaaaacttgaggaattaagaaatgcaaacagcaataaaaatgaataaaacagagaaaaaaacaatgaaaccagattataaaaagacaacctgcgcctgctttatcggttatattgtgcaggcagttgtgaacagctttgtaccattgctgtttgtgacatttcagaatacatatcaaatcccgctgacgaagatcacgctgctgatcacgataaactttgtaatccagcttcttgttgatctgttgtccgcaggctttattgacaagatcggttaccgggtgtccgtggtgctggcacatatctgtgtggcggcaggacttgtaatgcttacgattctgccggaagttttttcagatccatttctgggcattttgtgttcagttgtgatttatgcagtgggtggcggacttttagaagtgctggtcagtccgatcattgaggcgtgtccgactgataataaggaagcggcaatgagtcttttacattcattttactgttggggatgtacgggagtcgttttggtttccactgtgttttttgcattgtttggaacaggacattggaaaatactgacgcttttatgggtgctgcttccggtttttaatatgattttgtttacgaaagttccaatctacagtctccacgaagaaggcgaaaagggcatgaccatgacagaacttttcaaggagaaagtgttctggcttctgatggtgatgatgatgtgtgccggagcctcggagcaggcagtgagccagtgggcatcgacctttgcggagcagggactcggaatcacgaaaacgatcggagatctggttggtccgatggctttttccattttgatgggaacatcgcgcctgatttatggaaaatatggagacagaatggatctggaccggtttatgaaattaagcacactactttgcatttgttcgtatctgatgattgcatttgtgccaattccggcggtagaactggcgggctgtgcaatctgtggcttttcggttggaattatgtggccgggaacgttcagcaaagcgtctgcgtctttgcggaggggtggaactgtgttgtttgcacttcttgcgttagcaggagacttaggctgctccggcggaccaacacttgttggattcgtttcgagtgcattttccaataatctgcgtgtgggaatcggagttgcgattcttttcccggttttgttgttggcaggacttgtgttattgcaaaaaaatagtgtaaaagaaaaataatatataagattagtaacaaatcttagcataatctttagaaacctaggaaaaaccatacgtttcataaagaaacgtgaaagaaatattaagatttgcttaaagcactttttttctaaaatcaatatggtacaatttgccataggtcaaaaaagacaagaaaaaaaggagatcatataagcatggaagacaacaatataaaggaaaaaaagcatttctttcataaaaaagaaaagcaggcagaattagcaacagtaccaaagaaaaagaagaaagtatggttgatcgttctgatcatagcagcgattgtggtagtactgatcgggagtgctgttaaaaatatgacttcacagatcgagacagcagtgaatactgttgagatcgaaccggtggagaagagagacctgtcagattctgtttccttaaagggaacgatcgcgggagtgagcaagacgaacgtgatgtctcttgcagccgcagagatcactgcagtggatgtgcaggtaggtgatctggtaaaagagggtgatccgcttgttacattagatcagaaggatattgaaaaacagatcgcagaattaaagaccagcatcaataatgcaaatgcaattgcagcaaacgacgcggcacagaagcagaacagtcttacccagaacaaacaggatcagcaggatgcactggatgcagcacagaagacgatcgataaagcacaggctgatgttgataaatataagaaaaaggtatcagagtgtgaggattatatttattatctgaaaaacaaccacaaagatacttctgagtatgatggaaaattagatgtttttaaatcatctttggagacagcacaaaatgcattggattccgcaaatgacaattatgaagctgtgttaaaaaacacggacagaagcgttgctactgcccagaataccgtcgatatgcagaaataccagacaagtacgacaagtgacttaaaagaccagttagagcagttgcagaaacagcttgcagactgcacactctccgcaccgatcggaggcgttgtcacagccgtcaacgtgtcggtgggtgataaaaatacagcaggtacgacaatgatcacaatcgaggatacatcttccttaaaagtgatcgtgaatgtagaggaagcagatattttaaaaatccaggaaggaatgcaggcaacggttacgacagatgcaaccggtgacgaagagatcaaaggtacggtgtcacgggttgtcagagtgaaaaaccagtcaaccaacacaaacagcaccgacaccaacacttcaacaggttattctgcggagatcacgatcgacaatacagaacttttagttggtatgagtgccaaagccaaaattgtgatcaaagacagaggtacacagcttgcagtgccatatgatctgatacagtatgacgaaaaaggaaatgcttttgtccttgtagcccagatgaatgacgatggaacggcaactgctgtccgtaaaaatatcaaagttggggaagaagtggattattatacagaagtaaccggtggagacttaaaagagggtgaccagttaatttatgataatacattttctgttacagaaggtcaggtgttcacaccagatcagatgtactctaaccagcagacaactgacggcaatgcagtcatgagtacggaggcagaataatcgtgagtgaatcagtaatccgtatggagaatattataaagcgttattacataggcaagccgaacgaattacagattttaaacggaatcaacctgtctgtaaatcagggcgaatttgtctcaatcgtcggtgaatccggttctggaaaaagtacgctgatgaacattatcggtgtccttgaccgccagacggaaggaacatactttcttgagggaaaagatgtaaataaaatggatgatgccatgcgaagcgcgatccggaataaaaggattggttttgttttccagaacttcaatcttctcccaaaagcaaatgcattgaaaaatgttatggttccacttttatatagtaccgaaaaagaaaaaaatcaaaaagagcgcgccatggaaatgttaaaaatggttggcatggaagaacgtgctttccataagccaaacgaactttccggtggtcagaaacagcgtgtggcgatcgccagggcaatgatcaacgatccggcgatcattttagcagatgagccgactggcgcattggattctaagactggacatatggtcatggatctttttcacaagctgcacgaggaacagggtaaaacgattgtgctgatcacacactcacaggaacttgcggcggaaacaaaacggatcgttactatattagacggtaatattgtgtcggacaatggaggtgaaggctgatgtttttggaaaatataaaagaggctgtcaccagcattttcagcaataaaatgcgttcgattctgaccatgttaggaatcatcattggtatcagtgcagtcatcacgatcacgacgatcggtaattccattcagactactttgacatccaccttaaattcactgggtggcaatacggttcaggcatatgtggatgcaagatatccggaagatgatgcagactgggagacatgggaatacccggatatgaaaacatcggactttgtgacacaggagatgatcgatgaactgttggaaaagtatccggatgagtttaacggtgttgcggcttccgaatttcttggaaacggacagatcagacaggacaaaaacacttatgccaatgtgtcgattcagggaactacatcggaatatatagactatatgaagctaaaaatgcatgccggaagaaacttaacgaagcaggatggcaaaggcaaaaagaatgtctgccttgtggcagacacgatggcagaacagtattttggagaggaaaatccaatcggaaagcagatcacatataccggaagtgacggaaacctttatgattttacaattgtaggcgtatatgaatataacgtagcacttttcgggcaggtggatacgagtgtgccggaaaaagatcgttctacgacaatgtttatcccaatccagacctgttttaaattggaagggaaagaccagtcaggctatcagaactttaaccttatggtgaatccactttccgatattgatcaggcaaccacagatgtgacgaatttctttgaagaaaaatatgcaaataataaaaatttccatgtttctacctataatatggcatccgacatgggcatgatcaataccgttattaatgtcattacaattgcagtgtcaggaattgcactgatctcgttgatcgtaggtggtgtcggtgttatgaacattatgctggtgtcgattacagagcgtaccagagagattggtgtgcgtatggcattaggtgcaaagcgaagtacgatccgtatgcagtttgtcattgaggcaatcgtgctttgtatttttggaggtattattggaatactgattggtgtgtttaatggatttgtattaggaaaagtagcaggatttgtgatccagaatatgtattcggaatattcaagctacattattatgtccgtacatccgtcaatatccgcaattttactttccctgttcttctccatgctgacaggagtgttcttcggatactatccggcaaataaggcatcgaagatggaagtcattgatgcattgagatatgaataaaaggaaaaagtatattttgaaggggcagccgcgtggctgtcctttctttcacaattttttcacaaaaaacttgaaaaaaacctgcaaatactgttgacaaaaaaataggatggtgctatgttaggtacatagatattagcactccaatcaaatgagtgctaacaaatctaaaaacacacagataattgttcagtgacaagtgttgttggacaattacgatatctccagaagcaggagcgagtgaatggaagaattagaattagacgaacgaaaaacgaaaattttaaatgctatcatccgcaactatttggaaactggtgaaccggttggatcgagaacaatttcgaagtacacagatttgaatttgagttctgcgacaatccgaaatgagatggctgaccttgaggagttaggttacatcttacagccacatacttcggctggaagaattccttctgacaaaggttaccgcttctatgtagatcatctgatggaagagaagaaccgggaagtggatgacatgaaacagtttgtcatcgaacacaccgagaagatggaacaggtactgcagaaggttgcaaaagttctggcagccaataccaactatgcaacaatggtatcagcaccgagttatcatcggaacaaagtgaagttcattcagctttcgaatgtagatgaagaacagattttagcagtcattgttaccgaaggcaataaagtaatcaataagatcattccggtatcggaggcaatcgataatgagacgatgttaaagctgaacttcttactgaattctaatctgaacggactggcactcgaggagattaatcttggaacgatcgcaaagttgaaagaacaggcgggaatccacagcgatatcgtcagcaatgtacttgatacattaggcgctgcaatgagtcaggatgaggatattaagatttatacgagcggtaccacgaatcttttcaaatatccggagttatcggattcagcggaaaaagcaagtgagctgatttccacttttgaggaaaaacagcagttagcaagccttgtaactgaaaacctgttagatgaagaaaatacaggaattcaggtttatataggaaatgaaagcccgattcagaccatgaaggactgcagtgttgtgactgcaacgtatgaattaggcgaaggtgttcggggaacgataggaattgtcggaccgaagcgaatggattacgagaaagtaatggcgaatctgaacacattgaaaaaatctctggacggcatattgaataagccgaagggagaagtatagaaaggtggctgggaaatgcaggaaacgaataaagaagatgttttagaagaagttttagaggatttggaaaaagagtcccaggcagatcagaccaaagaatcagcaaaagaagctgaggcagcagaggatacagcttctgagacagagacacaagaggcagacgcagaagaaacagaggaagcagaagaaacttccaaagaggattctgatgataataaaaaaggattcttcaagaagaaaaaagacaaaaaagatgaacagattgaagatcttaccgatcgtctgagacgccagatggcagaatttgaaaatttccgcaaacgtactgagaaagaaaaatcacagatgtttgacatgggagcaaaaacaattgttgagaaagtgcttccggtgatcgacaatttcgaacgcgggcttgcggctgtaccggaagacaaaaaagaagatgcttttgtcgtaggtatggataagatttacaaacaattccttacaacattagaggaggctggtgtaaaaccaatcgaggcagttggacaggaatttgatccaaatttccataatgcggtgatgcatgtggaagatgaagaacttggcgaaaatgttgtcgcagaagaacttcagaaaggttatatgtacagagacactgtggttagacacagcatggtaaaagtagcaaattaaaggaggaaactattatgagtaaaattattggtattgacttaggaacaacaaacagctgtgtagctgttatggaaggtggaaaacctaccgttatcgcaaaccaggaaggtgcaagaacaacaccgtctatcgtagcatttacaaaaacaggtgagagattagttggtgaacctgcaaaacgtcaggctgtaacaaacgctgagaagacaatctcttccattaagagacatatgggatctgattacaaagtagcaattgatgacaaacagtattctccacagcagatttccgcaatgatccttcagaaattaaaagcagatgcagaaggatatttaggagagaaagttacagaagctgttatcacagttcctgcatatttcaatgatgcacagcgtcaggcaacaaaagatgccggtaagattgccggacttgatgtaaaacgtatcatcaatgagccaacagcagcagctttagcatatggtcttgataatgaaaaagagcagaagatcatggtatacgatttaggtggtggtacattcgatgtatctatcattgagatcggtgatggtgtcatcgaagtattatctacaaacggtgatacacaccttggtggtgatgactttgataacaaagtaacacagtggatgatcgatgagttcaagaaagcagaaggtgttgacttatctactgataagatggcactccagagattaaaagaagcagcagagaaagcaaagaaagagttatcttctgcaacaactacaaatatcaacttaccattcatcacagcaacagcagaaggtccaaaacattttgatatgaaccttacaagagcaaaatttgatgaattgacacatgatttagttgagagaacagcaatccctgttcagaacgctatgaaagatgccggacttacaaacgctgatcttggtcaggtattattagttggtggttctacacgtatcccggctgttcaggataaagtaagacagttaacaggcaaagagccaagcaaatccttaaacccagatgaatgtgtagcaatcggtgcttctatccagggtggtaaattagcaggagatgccggtgctggcgaaatcttacttcttgatgtaacacctttatcattatctatcgagacaatgggtggtattgctacaagattgatcgagagaaatacaacaattcctacaaagaagagccagatcttctccacagcagcagataaccagacagccgttgatatcaacgttgtacagggtgagagacagttcgcacgagataacaaatccctcggacagttccgtctggatggtattccaccagcacgtcgtggagttccacagatcgaggttacatttgatattgatgccaacggtattgtaaatgtttctgcaaaagatttaggaacaggaaaagagcagcacatcacaatcacatccggatctaatatgtctgatgatgagatcgataaggctgtaaaagaagctgctgaatttgaagcacaggataagaagagaaaagaagcaatcgatgcaagaaacgatgcagattccttcgtattccagacacagcaggcattagatcaggttggagcaaatctggatgcaaatgataaagcagaagtagaagctgacttaaatgcagtaaaatcattcttagacgcacaccagaatgcagaagaaatgacagatgcagatgtcgctgagttaaaagccgctcaggagaaactgacacagagtgctcagaaagtatttgctaagatgtatgagcagacacaggcagcacagggtgctcagggagcaggtcctgacatgagcaacatgggcggagcacaggctaacaacgctggtgcagcagatgatgatgttgtagatgctgacttcaaagaggtctaacagataataggcataactgataatcaacagatcagcgatgcacacaaaaaggggttttcggattttccggaaatccctctatgtgataatataggaaaagaatgactggcttttaaagtgaaaatcagttgtgaaagacggtacagaaaagtaaaagcaaggagtaacagttatggcagagaaaagagattattatgaagtcctgggcgttccgaagaacgcaagtgatgctgatataaagaaagcattccgtactcttgccaaaaaatatcatccagatatgcatccgggtgataaagagtgtgaagaaaaattcaaagaggcacaggaagcctatgctgtgttaagtgatgcagagaagcgtaaacagtatgatcagtttggtcatgcggcatttgacggtacaggcggcggtgctggcggatttgatttttcaggcatggatatgggagatatctttggagatattttcggcgacttcttcggcggcggtggcgccagaagaagaggcaatgatggaccgatgaaaggtgcgaatctccgtaccagtgtaaggatcacatttgaagaggctgtttttggatgtgagaaagaaattgaaatggttctgaaggatgagtgtgcagcctgccatggtacaggtgcaaagccgggtacaagtcctgagacctgtacaaagtgtggcggtaaaggtaaggttgtgtttacacagcagtccttctttggaacggtgcagaatgtacagacctgtccggattgtaatggatcaggtaaagttgtaaaagataaatgcccggattgccgcggtacaggatacattgcaagaaagagaaagattcaggttaccattccggctggtatcgacaatggacagagtgttcgtatccgtgaaaaaggagagccgggtgtcaatggtggtccaagaggagatttattagtagaagtagttgtatccagacatccgattttccagcgtcaggatatgaatatttattccacagctccggttacctttgcgcaggctgcattgggcggtgagatccgcatcaataccgttgacggagatgtgctgtacgaagtaaaaccaggtacacagaccgacaccaagatccgtctgaagggaaagggagttccatccctgagaaataaagaggttcgtggtgaccagtatgtaactctggtggtccagacaccgacaggtcttaataatgaggcgaaagaggcgttacgtcattttgatgaactgacaggtggttcgttaaaccgaagcgacgccggtggtaacggcacccaggaaaagggcaaaaagaaaaaaggattcatggataaattaaaagagtcctttgatgaaatgtaaaaaacaaaaatcttagtgtgaaaaatataaatttctataatgattataaattgaccgcaccacaattgttaggtacggtcaacctataatcattcgtttaataataagtattctgaaaaaaatcagtttataaaaatcccagatgtaaaagagaatatgagagacagattcaaaacggaaggataaggacattgataattgaataaaggctttacacttgtctgaaatccgcctataatattgttattgatatggaagggcggtggaagggatgttggataaaatgccaagtaaaaatgcaagtgaagtaattgaagaactggcaagaaaacttgaacgccagcgtatttataatgatttatgtaatgttgagacgatagaggatattcaggagttaaaagaaaaatacagaatgctttgtgaagaaattgacaattgaaacgataaaataatatataattcataaaaacaaaagggtgtaaagtctttattgaataattaagactttacacccttttgcttgtgaagaataattttaattttttattccggataaaccagatgcttctcatcgatatgataaagcgtgttttcaagataacggttggcaagataattcgccataccaaggttcatatcgagataatttccacagtcttttgggcttgcgccaggaacatctcccttaaaatcgcggataaactcaaacatttcgatcatcagaccaacaatgtcctttgattcataatcacctgcgagaagcaggtaaaatccggtacggcatcccattggtccaaaataaatggttttagagccataaacggaatgatttcttaaaaaagttgcagcaagatgctctatggtatgcatttctgcggtattcatgactggttcatcgtttgggaaagtcatgcgcaggtcaaaggttgtgatcacttcagcgccaacagtgtccttgcgggatacataaacgccgggctctaatttgatgtggtctatggtaaagcttgctattttttccatgatagtctccttttttgtattttcataattatatagtatttccagtacaaactttaaagtaaattttcatgacagtcaagcagaaatcctacatgaaaataaaaatagcagaaagcgcggcgaaaacacttgtatttcatgtaaaaataatgtatatttatgcagacaatcagaaaaaagaggagcggatatttatgatgaagaaaaaaagtaaaaaattgctgctttggtttttcgttctgacatttgtgctgacaggaattgctggatgcggcacaaagcagaatgatgatcaggaagcagcatccacggaaacagccggtgtgatcagcggtgtggatgatatcgttggaaaaaagattggtgtccagcttggaacaaccggtgatatttatgtttccgattatgaaaatgacggatcaggaacaacggtggagcgttacaacaagggcgcagatgcagtccaggcgttaaaacagggcaagattgactgtgtcgttatcgatgaacagccggcgctcgcatttgtggaggagaatccgggcttaaagatcttagatgaagaatttgcactggaagattatgcaattgttgtggcaaaaggaaatgatgccctgttagagcagatcaatactgcattagaggaattaaaagaagacggaacgattgatcagatcacgaaaaattatgttggtacggatgaggaaaagggcaattatccatacgaggtgcaggatatcgcgcgcgagaatggaacattgacaatgggtacgaatgcagagttcccaccttatgagtattatgagaataataagattatcggtattgatgtagacatcatgcaggcaatcgcagataaactcggtatggaattgaagattgaagatatggcatttgattctattattccagctgtgtctacggggaagatagatgtgggcgctgccggatttactgtgacagaagaacgaaagaagaatgtcaactttacagatacatatgcaacttccaagcaggtgatcattgtacgtgatgggaatgcagtgacagcaaagagttcgtttggcgaaaaattttaccagaactttatccaggataaccgctatgcatatatgttaaaaggtcttggaaatacattgatcattacaatatttgcggtgatgatcggtattgtcttaggatttttaattgccattgtcagaaccagtcatgacagaaatggcgggcttggcattctgaatgcagtctgtaaagcatatttgacgatcatccgtggtacaccggtcatgatccagttattgattatctattatgttattttccagagtattaacacggggaaaatcgtggtagcagtgatcgcatttggtttgaactcagctgcttatgtggcagagatcgtgcgttccggaattatggcagtggatatcggacagtttgaggctggccgcagtcttggacttaactacagacagactatgacatccattattctgccacaggcggtaaaaaatattcttccggcgctgtgcaatgaatttatcagcttgttgaaggaaacttcaatcagtggttacattggtctgatggatctgacaaaaggcggcgatattatccgaagcgtaacatatgaggcgtttatgccgttgattgcagttgctgtgatttatctgttaatggtagttggattaagtaaggcggtcggtgtcttggaaaggaagttgagaaacaatgagcgataatacatatacaacgaataatgcagaagtgattttggagatcaaagatctctgcaaatcctttggtgatcacgaagtattaaaaggaatctccacgactatcagaaaaggggatgtccttgcattgatcggaccttccggctgtggaaaatccacatttctgcgatccttaaacctgttggagatcccaacgagcggacatgttttattcgagggaacagatatgaccgacaagtcagtcgacattaatcatgtccgtgaaaaaatcggaatggtgttccagcagtttaatctgtttcccaacatgacgattaaggaaaacattatgcttgccccggtaaaactcaacaaaatgaccagggaagaggcagagaaaaaagcaatggaacttttgaaaagaatcggtctttcggaaaaggcagatgcatatccaagccagctttccggcggacagaaacagagaattgccattgtccgttcgcttgccatgaacccggatattattttgtttgatgagccgacttcggcattggaccctgagatggtcggcgaggttttaagcgttatgaaagaacttgcagaggacggtatgaccatggtggttgtaacacatgaaatgggatttgcaagagaggttgcaaaccgtgtcatgttcatcaatgacggtgtcattcaggaagaaaacacaccgcaggagatctttgaacatccacagagtccgagattgcaggaatttttatcaaaagtattatgatcatgaaagaaaaaggctgtgcggcagcctttttctttttctttatttctggtgtgaaattcgctataatcgatatagaatccaagacacaggtatggaaacgataaaaaacgatggaacattatacagggagaaaacgatggggaaaaaggaatggaagaagatcaggcatggaatcatcatttttgcgatggcatttttcagtgcaataccatttgtggtatatggaaaaaataatgattccggggaaataatccgtattggatatattgattatggcgggtttatcgatctggatgaaaatggggagtacacaggatatggcgtggaattgctggataagatcgctgagtataccggatggaagtacgaatatgtgtatgacacatgggacaatatcctgaaaaaactggagtcaggtgagattgatatgatctgtcaggcgcagaaaacaccggaacgtgaggagagattcctgctttcgaagtactgggcgggaacagaagcctgtgttctttatgcaagactggatgatgacaggtattattacaatgattttgaggcttttaacggcatccgggtggcaggactgaaagaaagctttcagaatgatgatctgaaagaatatgccaaaaagaaagatttttcgtttgagttgaaagaatacaggacgacagaagaatgtttccaggcactggaggaaggtgctgtggacgcggtcgtacagggatcgcttggcggaatgacagattataagattatctgccggtttggagcacagccattttatctgatggcaggaaaacagaagcaaaaggtaatggaggaagccgattatgcgcttggagagatcacagcggattacccgacattcttaagtgaactgtaccagaagtattatggagatacttctgccatggggcttgcatttacaggagaagaaattgaatatattaaggcacaaaagcaggtgaacatggcatttatcaataacagaccaccgttttcaaaggaaaatgccgatggagaaatcgaagggatcattgttgatctcgtgagcctgatccgggagagcagtggcttgaatctgcagtacacgatgctggaaagcggtcagcgtgtggtagattatctggagaaacatccggaagatctggtagccggtgtcgtagttgaaaatcctgcattcacaaaagctgattatctggtatcagatgtcatatacacaggggaagtggcgcttgtctgcagacaggggatgaactatacacccggagatgcagaaaataagtatattcttgcgatcccgaagagttatgcggcactggaaaattatattcaggcaaattatccggagtttgagatcgtaaaatgcactacgacagaggaatgtatggaacttctgaacagcggagagtgcgactttatggcacagaatgtcaacgtggtgacaccgctgctacagaaaccgcggtatgagggattgacggtactgcctaacctgtctaaggaagaaccgatggggattgttggaaaaaacagtgatgaaaataaaatcctgatgagcattattaataaatgcattatgcagatttcctctcaggaagtatcccagatcacgatcagccatacagtggcgaatgggtatcagcttacctggacggatgtgctgtataagttccgctatccgttgatcgtcatctttgttttgctggcggcgagtattttgtttatgattttctggcaggaggcgagacgaaaaagctatttaaagattgcagagaagaatgagcagcttttagaggcagtcggtcaggcaaaccgggcaaatcaggcaaagagtgatttccttgcaaggatgagccacgagatacggacaccgatgaatgcgatcgtaggactgacggagatagcaaaacactatgaggatgatccgaagaagatagaggactatctcgaaaaaattgatgtgtcgtccaaggtgctgttaaacattatcaacgatattttagatgtgtcgtctatcgagaataagaagatgaaaattgcacaggaaccgtttgatcttcatgagatcttaatgtcggtctgcacgatttatgaaccgcagtgcagacagaaagggatagcgtttgaggtgcaggacgaagaggtgacgcatacacatctgatcggggatggacttcgtgtgaaccagattttgttgaacctggtttccaatgcttacaaatttacgccgtccggtgggaaaatcacgatcaaagtgaaagaactctatgtgaaggaggagaaagtttactttaattttcttgtggaagataccggggagggcatgtcggaggagatgcagacgcggctgttccagccatttgaacaggagagtgcgacaactgcacagaaacacggaggaagcggactgggactgtccattgcaaaaaacttcgtggaactgatgtcaggctccatttccgtgagatcgaaaaaaggagagggaacgacatttgttgtgtccattccatttgaattcgaacagattacagaaccagaaacaacggagcagccggtggaaaacaatttatctgtggtacaggaagaacaggcagtatatgattttaccgggaaaaaagtattgctagcggaagacaccgcatttaatgaagaggtggcaacagaactgcttgcaatggtacatatggatgtggattgtgcacataacggtcaggaagccgtagagttgtttgagaagacggagccagggacttacatggcaattcttatggatattcatatgccggtgatgaatggttatgaagcggcacgcacgatccggaagtcagagagagaggatgccggaacaattgctatttatgccatgactgcaaactcttttacggaggatgtcagtgcggtgttaaatgcgggcatgaatggacatatcgcaaaaccgatcgatgcgcagattttatatgaaacactgcaaaaactcgtaacacaaaaaccataacaggaattatttgcaacctgaaatgctttgtggtagtatatttaatggatttttatgatttgaacggaaaatacgcaaaaaaggagcatatagaaaacatgaaatggaataaatataccattgagacaacgacagcagcagaagattacttaagctctgcacttatggatctcggtattgagggcgtgcagatcgaggataatgtgccgctgacaaaagaagatcaggcagagatgttcattgactttttaccggaactcccaccggatgagggaatcagttatgtgagcttttatttagaggacaatggacaggatgataccgaactgttaaagcaggtgaaaacgacaatcgaggagatgcgtcatatcgtggatatgggaaccggaaagatcacttctgaccagaccgaagatcttgactggatcaacaactggaaaaagtttttcagttccttctatattgaggacattctgatcaaaccaacctgggaagaattaaaggaagaagacaaggacaagtttttgatcgagatcgatccgggtgtgtcttttggaaccggaaaacatgagacaacacagctttgcatccggcagttattaaaatacatccgtggaaatgaagattacacaccacaggtaaaggcaccaaaagttttagatgttggctgcggaagtggtattttatcgatcgtagcattaaaattaggtgcagcagaagtagttggaacggatcttgacccggactgcatgacatcgacccatgataattttgaggtgaatcatctggatcagaaacagggcactttttatgtcggaaacctgatcgatgatacaaaacttcaggaaaaagttggaacagaagagtttgacatcgtagttgccaatattctggcggatgtgattattccaatggctccggtcattccggcgagattgaaaaaaggcggctgctttatcacatccggaatcattgatttcaaagagaacgctgtaaaagaagcgattgaaaaagcaggtcttgaggttgtggagatcaatcatcagggcgagtgggtgaacattacagcaagaaagaattaggaaaagaaatgtatcagttttttatagaaaatgagaatgtggcagaagattttgtgacaatcgagggcagtgatgtcaaccatattaaaaatgtactgcggatgagaccgggagaaaaaatccgggtgtgcacgaaggacggacaaaactttttttgcagcatttcagatattacggagagttttgtccgcgcagatattatagaaaaagaggcggacagcacagaacttccgtgtaaaatctatctgtttcaggggctcccgaagaatgacaagatggaatggatcattcagaaaacggtcgaactcggtgtgtacgaagtgattccggttgccatgaaaaactgtgtcgtcaaattagacgataaaaaggcaaagtcaaaagtggcacgctggcaggcaatcgcagagagcgcagccaagcagtccaagcgaagcctgatcccggaagtgaagatgccaatgtcctataaagaagcggcagcatatgcaaagcagttagacgtaaagctggttccatatgagaacgagcatggaatggctggaacaaaggctgcggtagagcagatccaaatgggacagagcattgctgtattcatcggaccggagggcggttttgcaccggaggagatcgagttagtgcaggacgagatgcagctaatctcccttggaaaaagaattttaaggacagagacggcgggtatcgcagcacttacgattttgggatatcagcttgagagcagtgatgtgatagaataacagtgcaaaagttgtctggtaagagaaatttgtgagtcgaaagttatcagatgattgagagatataaagaaggacaattatggaaacgaatttaacagaagtttatttggataattctgcgaccacccgttgcagcgagcgggcaaaagatgtgatggtaaaagttttgatggaggactacggaaatccttcttcccttcacatgaaaggtgtggaagcagaaaactatatcaaagaagcaaagaaaaagatcgcaaagacattaaaggcagatgaaaaggagattctttttacgtcaggcggaacggaatcaaacaatacagcactcattggggcagccttggcaaataaaagagccgggaaccatattatcactacatctgtagaacatgcgtctgtttcggctgtgaccggatatttagaggagcttggttttcgcgtaacctacctgaaagtggatgaaaacggcattatttcactggatgaactgcgcgaggcagtgtgtgaggacacgatccttgtctcaatgatgatggtcaataatgagattggcgctgtggaaccgatcgaggaagcagtgaaagtaattaaagcgaaaaatccgaacacgttagtgcatgtggatgcaatccaggcatatggaaaatatcgtattttcccgaaaaagctcggaattgatatgctttccgtcagcggacataagatccacgcaccaaaaggaaccggatttttatatatcaaagataagacaaaagtaaagccattgatctatggcggcggtcagcagaagggcatgcgctccggaaccgagaacgttccgggagttgctgcgttgggtgaggctgccgaagagatttatgagaacttcgaggaaaaaatagaacatctttatcagatcaaaaaacggtttgtagatggtgttttaaaaatagaaggtgtgaccgtaaacggcaagaccggacgggattctgcaccgcagatcgtcagcgtgagcattgacggcgtgcgcagtgaggtcatgcttcacacattagaagacagaaagatttatgtatcagctggaagtgcctgttcctcaaacaaaccttctgtcagccatacattaacgagcatcggacttaagagcaatcttttagattcgacaatccggttcagcttctcggtgcataccacagaggaagagattgattatgcactcgaagtcatgaatgaggttgtgccgaagcttcgccgttatacgagaaaatagcagagaaaaggagaaaacatgtataaatcatttttgatcaaatatgcagagatcgcgatcaaaggaaaaaacagatatttatttgaagatgcattggtaagccagatcaaccatgcattaaaaaaagtggacggagaatttcttgtaagaaaagagcagggaagaatttatgtggatactttaagcgactacgattatgatgaggttgtggaagcattaaaatgtgtattcggtattgttggaatctgcccggttgttctgttagaggatgagggatttgataagcttgcagaggaagtgaccgcatatattgacaaggtatatccggacaaacactttacattcaaagtcaatgcccgccgtgcaagaaaaaattatccgatggaatccatggaaatcaatgcagccatgggtgagaaaatcttagatgcttacccggagacaaaggtggacgtgcatcatccagaagtggtatttaacattgagatccgtgcaaaaattaatgtgtactctacaatcattccgggaccgggcggaatgccggtaggaacgaacggaaaagcaatgctgcttttatccggcggaatcgacagcccggtggccggatatatgatcgcaaaacgtggtgttacgattgatgccacctatttccatgcaccaccatatacgtcagagcgtgcaaaacagaaggttatcgaccttgcaaaaattgttgcaaaatattccggaccgatcaatcttcatgttgtgaactttacggatatccagctttatatctacgagcagtgtccgcatgaggaattgacgatcatcatgcgccgttacatgatgaaactggcagagcattttgcaaaagagaataaatgcctcggacttatcacaggcgagagtattggtcaggtggcaagccagacaatgcagtcacttgcggcaacgaacgaagtatgtaccatgccggtatatcgtccgctgatcggattcgacaagcaggagatcgtgacaatctcagagaagatcgatgcgtatgagacatccattcttccatatgaagactgctgtactattttcgtggcaaaacatccggtcacaaaaccgaacttaaatgtgatccacaatgatgagagaaaactgaatgagaaaatcgatgcattaatgcaggaagcaatcgacacggtagaagttattcatattgaagggtaattaagacggcagtttcggataccgggactgccggttaggaaaagaaaaagccacagaattcatcttctgtggctctaaatcttcggaaagaattaaactaaatatggttttaatacttccatgatttcatccatattgctttcagcatgaattgctaaatcaataggtttggataaatctaaactgaagatacccatgatagattttgcatcgattacatatcttccagagattaaatcgaagtcgaattcaaactgggtaatcgcattaacaaaagattttactttgtcaatggagtttaaagaaatctgtactgttttcatgttaaaaaacctccttgttagctatcaaagttaactttatagtaatggttttttatggaaaagtcaacacaaaataggagtatcaaatgaaaattaataagaaagctgcactgcataatctcgggtgtaaagtaaatgcatatgaaacagaagcaatgcagcagatattagagaatgcaggatatgagatcgtgccttttacagaatctgcagatgtttatgtgatcaatacctgctccgttacaaatatggcagaccgcaaatccagacagatgctgcataaggcgaaaaagatgaatccggatgccattgtagttggtgccggatgctatgtgcagacaaaagaggcggaggcactgttagataatacagtagatatcattattggaaataacaaaaaacatgaactgcttgcgatgatcgaagcgtatgagaaagaccacggaaattgtgagaatgtcgtagacattaatcatgagaagcaggagtacgaggaaatgtttttggagcgcacggcagagcatacaagagcatttatcaaagtgcaggacggatgtaaccagttttgcagctattgtatcattccttttgcgaggggaagggtgcggagcagaaaacttgaggatgtgatccgcgaggtaaaacgtctggcagaacatggatttagagagattgtgctcacaggaatccatttaagctcctatggagtggataccggagacagtctgctgcatctgatccaggaagtacacaaagtggagggaatcgagagaatccgccttggaagtttagagccgagaatcgtgacggatgaatttgcaaaagcacttgcagagatgccaaaaatctgtccgcatttccacctttcgttacagagcggatgcgatgcgaccttacagcgcatgaaccgcagatatgacacggcagaatatgaagagggatgcaggattttaagaaagcatttttcacatccggctatcactacagatgtaatcgtgggttttccgggagagacagaggaagagtttgccaccacaaaagaatatttagagcgcatccatttttatgaaatgcacattttccagtattccaagcgcgaaggaacgaaagccgcagtgatggaacagcagattccggaaccggtgaaaaaggaacggagcaatatccttttagcattagaaaagaaaatgtccgaagaattccgggaatattatgtcggaaaaaaggtgacagctttgatggaagaagcctatgaattcgagggagagcagtattttacaggctatacaaaagagtatgtgaagattgctgtaaagtcggcagaagacctttccaatcagtttgtgcagggaacgatccagggaagattgacggacgatatctatgttatggttgaattttaggacaaactatattagaataacgtagaggattattgtatttattcaataggttcgcgcatttactgtgcgaaccgtaagaacatgattcatgtgttcgcaaatccctttctgcatggcagattttaatggatttgcgaactgtaattatgaagtattgaataattacggattactttcttaccatagagtaaagaagagtataagggcgtgacaaatatgcagaacatcaataatacacaatatttcagagtggagaaggagccggaactgcaggtaaaagacgtacttgcaattgtgtatcgtgcactgagcgagaaaggatacaatccactgaatcagattgttggatatattatgtcaggtgatcctacttatatcaccagccataataatgcaagaagtctgatcatgaaagtagagcgtgacgaattagtagaagaagtattaaaagcatatattaagaataataactggaattaatatatgccaaagagggaaagtctgcccttttgcagacagaaaatggagattttttaatgagaatattaggcttggactatggctcaaagactgtcggcgtggcagtcagtgatgagcttttatttactgcgcagggactggagatcgtcagaagacagtcccctaataaactgcgccagtctttggcaagaatcgaagaaattatcgaagaatataacgtagagcgcattgttttaggttatcctaagaatatgaataacacagagggtgagcgctgcgaaaagacaaaagaattcaaagagatgttagaacgccgtaccggactcgaagtgattctgtgggatgagagactgaccacagtttcagcagacaagcatatgatggaatcgggtatccgcagggaaaaccgcaagaaattcgtagatgagatagcggctgtttttatcctgcagggatatcttgattatctttccatgcatccggaagaaaaataaaatccacagaaagtaatccaaatgtcggtaaatgatcaaagaaaggaagaaagatggaaaaagttgtttttacagatccggacacaaaagagaacattgatttttacgtgttagaggaaacacagatcaatggaacaaaatatctttttgtaacagaagaagaggatggagacagtgacgcttatattttaaaagaaatcgcagatgagaatgacgacatcgtctatgaaatggtagaagatgataaggaacttgcagctattggaaaagtatttgctgaactgatcgatgacgcagatattgaatattagtaacataagtctgcacattcagagtgaaggctttatgaaggtactgaacagttatgattattagtaaattaagaaatggaattggaattttgaagaaacaggaaaatataacagaaaatcttacaacagatgagattgtagaaaatacagaaaacgcaaaggtggcagaagcagcagagacagagaagaaacctgcacgcagaccggcgagaaagaatacaactgtcagaagaaaaaaatcagatgagacagtgaccgagaaaacagaaaaaggcagcagagcagagaaagcagaaaagagcggaaaaactgagaagaaagtcagcgcagagaagaaaacaaaaagtgcatctgcagagactgtcaaagtgaaaaagaacggaaaaagtaaagagaataaagatggaggaaaagatttgaagcagaatgaacattcttcaaagcttaagatcattccacttggcggattagagcagattggaatgaatattacagcttttgaatatgaagacagcatcattgttgtggattgcggattgtcattcccggaagacgatatgtatggaatcgatcttgtaatcccggatatcacttatttaaaagataacattgacaaagtaaagggatttttcatcacacatggtcatgaggatcatatcggtgcaatcccatatgtgttaaaagaagtgaacgtgccgatttatgcgacaaagcttacgattggtattattgaacataaattaaaagagcacaatatgctcacaaaagtaaaacgtaaagttgtaaaatacggacagcatatcaaccttggctgtttccgtgtggaatttatcaagacaaaccacagtattcaggatgcagcagcacttgccatttattcaccggcaggaacggttgtgcataccggagactttaaagtagattacacacctgtatttggagatgccattgatcttcagagattcggtgagattggtaaaaaaggtgttcttgcattaatgtgcgatagtacaaatgcagagagaccgggctttaccatgtcagaaaaatcggtcggaagaacgattgatgcgatttttgatgataataagaattcaagaattatcattgctacgtttgcatcaaatgtggatcgtgttcagcagatcatcaatgcagcatataagaacggaagaaaagtaatcgtggaaggccgcagtatggtaaatattatcggtactgcaagtgaacttggctatatcaatatcccggaaaatacactgatcgatattgagcagttgaaaaattatccggatgagcagaccgttatcattacaaccggaagtcagggcgaatcgatggcagcattgtcaagaatggcatccggaatccaccgtaaagtaacgatcaagccaaatgatacgattgtattaagttctaatccaattccgggaaatgagaaagcggtttctaatattatcaacgaattatccatgaagggtgcgaaggttattttccaggatgtacatgtatccggtcatgcgtgccaggaagagatcaagctgatctattctctggtaagaccaaaatatgcgatcccggttcatggagagtatcgtcatctgatcgcacaggcgagagtggcagaggaacttggaattaataaggataatatttttatcttatcttccggcgatgtcttagaactcgatgaggagagcgcagccgtaacaggaaaagttcataccggcgcgatcatggtagacggactcggtgttggagatgttggaaatatcgtattaagagacagacagcatcttgctgaggatggtatcatcattgttgttttgacattggagagcggttccggacaggtacttgccgggcctgatatcgtatcccgtggatttgtgtatgtccgtggtgcagagacacttatggaggaagcaaaacaggtgttagatgagagaatgcagtactgcatggataagggcattacagactggggcaagatcaagacagagatcaaagattctctcggtgattttgtatggaaagagacgaagagaagaccaatgatcatgccgatcattatggaagtataaagcgcttacgaggtagatgatgaatttgaacaaagtagtttttcgttttgtcagtatcagtttttcaatacttgttattttacttgtattgatcggatttgtaaaaattggaacttattgctatgagtttggttatcgtgtctttacggaggcgcctgtggacgcagagcctggcagggatgttatggttcagatctccagtcatatgtcagacatggatatcgcaaaggagctgaaggaaaaagggcttgtggaagatgcaaagctgttttatgtgcagttgaaagtatctgcatattccggtaaacttcatgacggtgtatacacattgaacacatccatgacagcaagagatatgatggtggtaatggcagcagagccggaacaaagtactgcagaggatacggagactgtgacagattcaaccgaacagacagacgatacacagacgaatacagtcacaggagaggaatagaagtgatcgttgacgagagactggtaacttatattaattccttggatacagggaatacagagattttagatgaaatagagcgcgaggcattagacagttatgtgccgatcgtgcgcaaggagatgcagagttttctaaagctgatcttgtcgatcaaaagacctgcaagaatccttgaagttgggactgcagttggattttcagcgatattgatggctgagtacaatccggtgccctgtgagatcacaacgattgagaattatgaaaaaagaattccaatcgcaaaagaaaatttcaggcgtgcaggaaaagaaaaacagatcactcttttagaaggggatgcagcagatattttaaaagagctgcaggaaccattcgactttatctttatggatgcggcaaaaggacagtatatccattttatgccggaaatcctaaggcttttaaagccggaggggattctggtatccgataatgttttacaggatggagatattattgagtcccattttattgtgacaagaagaaaccgtaccatttataaaagaatgagagagtatctgtatgaactgacccattctgaagagctggtgacttcggtactgccgatcggggacggaatcacagtgagtgtgaagaaggagaaatacgtaaaatgagaagaccagaacttttaataccggcaagcagccttgaagtattaaaaatagctgtaatttacggcgctgacgcagtatatattggcggtgaggcatttggactgcgtgcgaaagcaaagaatttttccatggaagagatgaaagagggaattgaatttgctcatgcacatgatgtaaaagtttatgtgacagctaatattttagcacacaatgatgatcttgagggcgtgcgggaatattttgaagaattaaggaaaattaaaccggatgcactgattattgcagatccgggtgttttccagattgcaaaagaggtttgtccggagattgagcgccatgtgagcacacaggcaaacaatacaaactatgcaacttatctgttctggtatggattaggtgcaaaaagggttgtttctgcaagggaattatctattgcagagattaaagagatccgggaacatattccggatgatcttgagatcgagacttttgttcatggtgcaatgtgtatttcctattccggacgctgtctgctttccaactattttaccggaagagacgcgaatcagggcgcatgcacacatccgtgcagatggaaatattctatcgtggaagagaccagaccaaacgaatatatgccggtctatgaaaatgagcggggaacttatatttttaactcaaaggatctctgcatgatcgaacatattccggatcttttcgacgcaggtattgacagttttaaaatagagggtagaatgaagacagcactctatgttgcgactgtggcaagaacttaccggaaggcaattgatgattatatgagatcaccggagctttatcaggagaatatgccatggtatctggatcagatttcaaactgcacttaccgccagtttaccaccggtttcttttatggaaaaccgtccgatgaatcgcagatttacgataacaacacttatttgaaagaatacacatacttaggtatcgtgggagaaacaaatgaagaagggctatatcggattgaacagcgcaataagttttctgtcggagagtgcattgaagtgatgaagccggatggagagaatatcgaagttacggtaaagcgcattgtggatgaagagggaaatgatatggaatctgctccgcatccgaaacaggtattatatattgatcttggacaaccgcttgaaatgtatgatattttacgcagaaaagagtaaacgagactagaaaggaatggttacgagtatggcacaggaaaaatatgtagcatatgtgggcacctatacccatgagaacagtgtaggaattcatatttatgatgttgatgtaacgaaaggatatatgacggaacgcaaagtggttccaatcaataatccgtctgatcttgtagtatctaagaacagaaaattcctttattcgattgcagatgaaggtgtggaagctttcaaaattttaaaagacggcgatcttgaaccaatcaacgagcagtggatcggtggcatgagaggctgttatgtagaagtggatgacgagaaccgttatctttttgtaggcggacatcatgacggacgcgttactatgatgcgtttacaggaagatggaagcattggcgacatcgcagatggtgttttccacaaaggaatgggaagaagtattgcacagcgtaactttattccacatgtagactgtgtaaaattaacaccggatcagaaattcctctgcgcagttgacaatggattagaccaggtaaagatttaccgtgttgattatgaaaacggaaagttggaactggttgatattatccgtggaccattggagtcagctcctcgtatgatccgtttctccagagatggaaagtttgcatatattctttatgaattgctgaatcaggtagaagtgtacagttacaatattgtagatgatatgcctgtatttgaaaaaattcagacaattacaacaatgggaccgaaagatgatgatgtctgcgctgcttccggtatggaagtttccaagagcggaaagtatttatatgtaagtaattccggcgtgaactctgttgtctgctatgcgatcgatccaaaagagggaactctttccgtcacattccagacgagagtctgcagcgatttccctaagatgcttgcaatcttcccggatgaaaagcattatctgacactgaacaatgcgtcaaatgatattgcattctatgcggttgattatgagaagaagtattctgtatgggaaggaaaacctgtgaaggttgataagccaaactgcatttatattttgaaactggaagcataaccggagtttgattggcgtagtgttcagatcctgtggtgcttttataggttgtgaagggcagatataagcgtcctctcacaagtcggaattttatatgttaatgaaaaagaaaaacggtataaacgaaatattatgtttctgttcgctggacattccgataagcctctaaagagtcttatctccatagctcacaaagaaaataatatttgttcataccgtttttctttcatttacgttgtgtgtccagcgaagctggaccacactagccggtgtaagtccggtcacggtaatcgccagtgagccgtgtagctaaactcggtg

SEQ ID NO: 14299 - DNA, 14487 bp, Unknown
  gut microbiota DNA sequence
aaattgctaatgttaaatgggttacaaaattttataagtaatcgtgacgggcaagtacgtttaagatatttctaccttcctcggtaccctcgataattctgcgggcacgtttgctgtctccgatattaacgatctctacgtttgtatcgctgaaagcttcctcgatttcacttaaaacaggagtgttagctctcataccaaggcagatgaaaccgtagttaaatggaacttcctcgatttcgccttctggatttttcacgatgaaacgatcattttttacttcctgtaaagcagtgtttgtcatctgttttacatggtattttgccattttggcgtttgtatcacattttgtgacaggatcaagaccattaccgatcattggaagcatctcaaccatagaaacttctgcgcctctctcggtgaagaattccattacgtcaagacctacagcaccaccaccgatgatggaaacttttttgccggtcatatcttctggatattcgttaatgcgctcgatcatctttaatacagttgcaacatttgtaccgtccttgtcaacaagatcatgaagacctgtgatcggaggaagtgttggaacagaaccggttgcatttacaataatgtctgggtttaagctcttaactaagtctgctgtggcacttgtatttttgaaaataaataagttgtgaagtttgcttgcacgatgaatcatgtagttcgggaagtctgcaagacgttttttgtccggaatcctggagattacggaagcaagtccgccgagctctgcttttttctcaatcaggaaagtggtgcatccaacttctgctgcggtacaggctgcttcaaggccagcagtaccaccaccgatgacaacaacgttgcagggtttgttcactttatgtttcatgtaatcttcaccagtgttaacggctgggtttacagtacaacggattggctggtttaaaccgattctgtgtcctgcacaaccgatgttacatgagatacatttacggatatcgcactcgttgccgaattcaactttatttacccattcaggatcagcgatcagtccacgtcccattccgataaagtcggcgtcgcctcttgcaaggatatcttctgcgactttcggatcacggatattaccaacagtcatacatggtttgccgtatttttcttttacagcttttgccatgtaagaacgccatccatctggtaagtagttagcgtcgatctggtactggatagaaccatttaaaccacaggaaacgtcaaatacgtcaacttctttttcaaagtactgtaagtactctaaagtatcctctaaggtgttaccgccttccattaactcatcagcactgatgcggacgaagattgggaagaatggtccaacctgtttacggacttcttcaatgactaattttgcaaatcttgcacggttttcagcggaaccaccaaattcatctgttctcttatttgtgataggcgagaggaactggctgatcaggtaagagtgtccggcgtggatctccactgcgtcaaaaccacagatctgcgcacgttttgctgcttcaccgtatttttttacaatgtggaggatctcttctttttccagaggtcttgggatttcgccacctgccttggaaggcacatcagatgcggataccggctgcattccgatacgggaagacattgcggaagcacctgcatgattgatctggatcgcaatacaggctccatgtttgtgtacgctttcacacaatttgaaaagtcttggaatataattgtcaaggtcgatgcgaagctgtgttgttccgttggaaccctgcggggaatccacgcttgcgttctcaacgatcaaaagacctgtaccacccttggctctctgctcatagtaattaatgtgaaggaaactcatttcaccattctgctcaccgtagttggttcccataggtgtcatgacgattctgttttttacggtcattctgcggatggtcattggttcaaaaatatgtggatatttggttttcatcgtaaaataatctccttatttgaaatattatctgaggaatcaataacgtgggcagacgttaattttttaacaaatgagaggtaaagtgaccttctcgttacattcaacttatatggaaatgataaaaatgtccaattgttatttttgcccgaaatgatagaaaaaatctatagattgatttataatttgagaggtacatttattatggaaaaataggaggggaacattatggcatttttttcgggaatcagtacacagaaaagagattctgcgagcgaggcagacggaggagaacttttcaaaggagcagcgtttattgcagcgggggtgctggcagcttcccttatgacaatggagattgcatctgtgttgaaacttggacttttggcagtcggggtggtgctctgtgcggtcggtgtgaaatggattgtgaagtattggaaagacaataaagcgtttgaggagtttgttccggagtgggacaaggggcgcggcatgtatgaccgttttgcaaaggaattgaatctgtggtatgaaaaaggaattacaccgcaggactgtgacggcgatacggcgtattttctcaaattgcagaaggaacgtctggacaaaaagggactgaaactgcatgagagtgttgtaccgtccaaaggaaccagctacggaacaggcaaggtatcgagaaaatctctctggtatacaacggatatgatgtatgagaatgtatccagaaaactttcttttgaaaatgagaatggaccggtttatgagcgggatacggagatggcgatgtacgagatcgtggcacattcaccgaatgaggcgcagacccagttcatccgcgtgacctgtccaaactgtggggcagtgaattctgtctcaaaattaggggaggggtgtccatactgtggtactgtgtttcagatcaaagatttgtttccaagagtgatcaatcttttctttataagaagtaattccagcgcaaaaaatggacagatcttcagacagtcgatgacattttccatgtccggtgtatttctggtgatgttgattgcaaatattgtcagaggaggacaaccattgcccctcatattgcttgccagctattttgctgcggtactggttggaggttttcttggatttatcgttgcggatatccgtctggtggcaacactttttgatcacgacggaatgaagcatttacctatattaaaatggggcagttcaaaacggaaaatcaaaaacacaatgctgcgctatgacaaaaatttttcttttgacaaatttgaaggacagcttgtttcacttgtgcgtatggcggtattagccgaaaaaccggaggagcttgcctgttaccgtgcagatgcgcgcgagccacttttttctgacattctggaaatgacttatacgaatgggatctgtctgaatggaatccgcatggagggaaatattatgcacatgtcggtgcggacctggtgggtaaaccattacgaggagcatggaaaagtgaaaaagagcggtgactgcattgatgttacatttcgcagaaatgtggaaaaacaggaagcacctggattttccatcacatccgtttcctgtccgggttgtggcggcagctttgacgcggtacggcagaaaaaatgtccttattgtggcagtgaatatcatatggaagaggaaagctgggtcatcgagcagatgcatttgatccggtaaaatagaaaagtggtaataatggaggcatacaatgaatttaaatcagcttcagtattttaagatattagcacaggaagaacattacacgagagccgcacagatgctctctatcacgcagccgtctttaagccacgcgatcgcgcagctggaagaagaacttggcacaaggctttttgaaaaaaagggaagaaatattgtgctcacacgttatggaaagttgtttcttccttatgtggaggaatctttaaaagtgcttgaggagggggtgcagagaaccagggaactgaacggaagcaaagagggtatcatccatcttgcctatatctatacaatgggaagcaatttcacacctaaaatggtgcggaactttctggatgcttacccggattatcatatcgactttcattttacggtgggaacgaccggagatattttagcgggattaaaagaagataaatatgacatcgtgttttcttcctatcaggagggagaaccggatatcgaatttcggaaaattggaaatcagaagcttgtggtggcagtgccgcaagaccatccgcttgctatccatggcagcgtagatctccgggacacaattgcgtacccgcagatttattttgaaaaaggaagcggactgcgtccggtcattgaccagatgtttgaggagatcaatcagttcccgaaggttgcctttgagatggaggaggactccagcatggcaggactggtcgcacagggattcgggatcgcggtcatgccggatatcccaatcttaaaatcactgaacctaaagacacttgagatcagtcatccggggtacgagcggtcggtgtatctcgccaccctgaaaaaacactatctgtctccggtagcaaaatctttcatccagttcgtatgtcaggagactgaggggcggtaagaagcggcagatgtaaggattttttaatatactttgattcgcaatatagacatccaatttgaagggaaccccattagttccaaagttttaacactgggattgtattttttaataactttctttaaatcataataaaacatgtggaagtctgtattatcaagcaaatatttcaaggagattaccgttgcaaataaatcagactttccctgctgatatctggagtttacttttggaatctgcaatttcttgtgggcaataaggtcggggatagaatcttgagttttggcattgaataaacgattgccatgtgcacatatattacggtatttagtgaggataatcagcatctttccaagttcatttctaccaatatggtgaaagtcgttacacacaagagttttacaatgcccctttaaatatctatacatagtggcagtttctccaattgtaagatccgttgtaagaacccacaacggtacatcctgataggtattcatgtaatgtgcaatctgtggagatggatgacgaccattaatctttccattcattttgcgaaaaaggtattgtacatcggatagatgatgtccgtagtcgtaattattgatgttctgataaaaagcaatgccattaccatatgtattgctaaagtgataagagatagaagattttacatgtttttcgaagattaatatatattttaagaaaacatcccttaattcagcatcaaacaggtataaattatagatatcatcaaaggtagtatcaggatagaagttatttgtagcaggatctttgaaaacatccttgtatccattaataagaccatagtaactgactttttcaagaaccgctgtcgcagagacttcattgttaatgactaactgcttttgctttaaatatttaatttgtgcctgataatctaaaaaaggtttctttcgcagattgctagccataaaaatacctccgaaaattcagtataaataacaaaacggcccccgcaggagccgcccgggttacaggcttctcaagtttctgtaactcattcactacgcaaagtataggtcattcaggacagaatgtcaaatgctttttggtagtgattatatgatatgcaactcctgacataattataacgcaaaccaatcgagaattttcatagaagccttacgcctgtacatttctcacgaaggcgatgaaccgctggacagccggcaactggtatttgccgcgcatatagcccatgtagacggtgtgggagaaagattcgcttgaaatcagggggcggatacagatgtcgtcgcggtagatggtgtcaacgtcagccacaagtgcaatcccaaatccctgtgccacaagagaggcaattccgttttcgtccggggattcgcagatgaaatttggtgcgatcccgtgttctttgaagaaactgcgtgtgtacttgccaagaccagagtggcggttgtatccaagcacctgatagtcggcaaaatcagcagcctgtaaagcctctttgcggctcagcggatgaccggccgggaggatggcgacgatttcctgctttataataggaacaaactcgatattgggttcgttggcagagtaggagccaaaaatcagatcataggcacctttttttaagccttcaatattcacggatgtgatatcctgattgaaattgaaggtgatattcttattctgctcaagtgagagaaaattccggacagtgcgcggaatatactctcttgccagaggggatacataggcaatgtcgatatgcccaccgtcagtggcaagatggcgcatcttgttctctgcacgtttcacatcatctaaaatctgcgtggcatgttctaaaaaaatctcacctgcttttgtcaggatcacatttcttcctcttttttcaaataaagttaccccaagttcatcttctaaagcactgatagaacggcttaaacttggctctgaaatattcattttttctgcggcctgattgaagtgctgtaacaccgctgcctggtaaaaatatcctaattgattaagcgtcatgcataaatctccttgaattaatagaaaatatctatgggttacaaaaaagatgtgctgattttgtgtatattataccttaattaatacataaaagctattaaaaaaacacaaaattagcattggatgtatcaaaaaaagcgttgtataatatcattatcagaggttgttaagtttttaacgaagtgggcagacgagttaagaaccagagtataacaacataataaatcacgtacataatcatttttttttaagggaaaaggagaaaaaattatggcagagagaattacaggacacacagaacttatcggattaatggcttacccaatcagacattccagctcaccggcaatgcacaatgaagcattcgcatacttaggacttgactatgcataccttgcattcgaagttgacaacagcacacttgaagatgcagtaaaaggtatccgtgcattaaaactggttggatcaaatgtttccatgccaaataaaacagttgtaggacagtacttagataaattatctccggcagcagagctttgcggagcagttaacacaatcgtaaatgagaatggtgtattaacaggacacatcacagacggtatcggatttatgcaggcattaaaggataacgatatcgatgtgatcggaaagaaaatgacgatcgcaggagccggcggcgctgcaacagcaattgagattcaggctgcattagacggtgtaaaagaaatctctattttcaacatccatgataaattctgggcaaatgctgaggaaactgtaaagaagatcaacgagagaactaactgcaaagcaactctttacgatctcgatgacaaagaaaaattaagagaagagatggctgactcttacatcttcgttaacggaactggtgttggtatgaaaccattagagggaatgtccgttgtacctgacaaatccttcttccgtccggaactcatcgttgtagatgtaccttactctccacttgagacaaccatgcgtaaaatggcaaaagaagttggatgcaagacaatgaacggacttggaatgatgttattccagggtgcagcagcattcaaactctggacaggaaaagatatgccgatcgagcatatgaaagaagtattaaacatcagatacgatgattaatcacaggataccgaataaactatttattttaaaattacgaggagaaaagagatgaataaaaaatatttacctagcgctctgatcctttatttaaactatttcatccacggtgtcggatgttctattttaggacaggcagtgatcaaggaagctcttgcagcatcctggggtgtagaagcaatggcaattacagcaatttccgcagcacttggacttggacgtctaatcgcccttccatttgcaggacctctttccgataagcttggacgtcgtatctccacagcaatcggtagtggatcttatgcgatctacctgatcggacttgcacttgcattcaacgcaggaacaaacggtggataccagatcgcatatgtatgtgcaatcgttggtggtattgcaaactccttccttgatacaggtatttacccggcagtatccgagattatttacaaagcacctggtgttgcaaccatgggaatcaaattctttattgcaatcgcacagatgatgttaccatttgtacttggtgcaaccgtagcaacaacagcagcaggacttacttcctataatatgttgttctatatttgcggaattgcttatattgtacttttagtattagtaatgatcttcccacttccagatgcagaccagaaggcagccggaaagaaagagggactgatcgacagcttaaaacatacccatttctctatcgagtccgtggcaatgatcctgattggattcacatgtacaggtacattccagttatggttaaactgtgcacagaactttgcaaaagagaatgtcggctgggcaaatccatctatcatgcagacatactactctgcaggaacaatgcttgcacttattgtaacagcacttttgacaagaaaaattaaagatgtcagatttatcgtggtatatccggtcatctgtcttgtaacactgatcgttgtattaacaggcaagagtgaagcacttatgatcgccggagcattcatcatcggctgggcaggagcaggcggactgttacagatcgcaacatctgtatgcaatatgttattcccgaaaatcaaaggaactgttacagcacttgttatgatcgcatcctcactttgcaactacacaatccttacagcagcatctaaaatgcagccagcacaggttatggttatgaacattgtccttactgcaatcggtgtacttcttggattgttcgtaaatatccgctatgcaaaaatggtagagcaggcagaatctgagaactaagagccagagtccgcaggctgcggactctaaggatttaagaagaaaggtgacgaaaatgaatacagttaaagtaagagatatcgagatcggtgcaggcgcacctaagatcatcgtacctatcgtaggtgttacaaaaaaagatattatcgacgaagcaaaaacatttgattccattccggttgatgttgttgaatggcgcgtggactggtttgagcatgtttttgagttcgacaaagtagaagaggttttaaaagagcttcgtgaggcacttggaaatattccaatccttatgactttccgtacttccaaagagggtggcgagaaagcaattgagccggaagcatatgcagagcttaatatcaaagcagcacagaccggatatgttgattttgttgatgtggaaattttcacaggtgacgagatcgtgaaaaaaatcatcgacggcgttcatgcagcaggtgtaaaggtagttgcatctaaccatgatttccacaaaactccggcaaagtctgacatcatttatcgtcttcgcaaaatgcaggatatgggcgcagacattccaaaaatcgctgttatgccacagaacaagagagatgtcttaactcttcttgcagcgacagaggaaatggtgacagactacgcagacagaccggtcatcacaatgtctatggcaggaacaggcgttatcagccgtctctgcggagaagtatttggatcttccatgacattcggagcagcaaagaaagcatctgcaccgggacagatgggagtagaggatctgtctacagtacttggattacttcataagagcatgtaattgattatacattatgtaaaagcctgttgcatgtaaaaagtgcaatgggcttttttaatgaataaagcactttatgacgttaagtggataaagaataaacgaaggagaataaatatggcagtaattagcaacagagaagcatatcttgcatcagagcctgagatggacataacacagtttcacaaaacagctcttgatcttaaatatgcagacgaatcagaaaatcagatactggacatcttctatccggaagacggagaaggtccatatccactggtaatcgtattccatggtggtgcttttgcggcggggcacaagagaacacattatatcaaatcaatgtgtctgcctataacacagggatacgcagttgcaacagtagagtacagactctaccacgaagaaaaatggccggcacagcttatcgatggaaaagctgcaattcgctatttacgtgcaaatgcaaaagagttaaatctcgatcctgacagattcgcagtatggggcaactcggcaggaggaactgttacacagcttcttgcagtaacaggcgatgaagaggatatggatgatttaagcgttggagtaaaagcttcatcaaaagtaaactgtgcaatcgcatggtacacaataagtgagctttgctctgcagagcagtttggaactgatattgcagatatcagaaacaaaacaggtgcaggaaaaggcatgatgccaaatgatggaaagggcaacgactcaatgtttacagctcttttaggatacaatccgcttttatatcctgaacgcactgcaaaagtaagccctataagtcatgtcaaagaggactgtccaccaatgctgcttcagcacggtacaaatgatcttgttatagattatcaccagtcttcttatatgtatgaaaaagttaaagcagtatgtggagaggatcgcgtagagcttgagctttttgataatgaaccacatggttctcaggtaataaaggcagatgccaatatagaaaaatgtatagatttcttagacaagcagtttttcgatggaaaaaatccatatcgtaagccacttggaaaaatcaaaatcgttggagaggaatagaaaaaatgtcaacagcaatatctgtaataggattacttgcagcagcggtaatctttgtaatcgcaatatggaaagggcttgatgtatttacatctacaatccttgtatcatttatcattattttaacaagctggatgaactggtgggattcactcacattatacgcaacaggctatgtcggattcattcagaacaatgtatttgtacttgtgatcggtgccgtatttggtgaacttatggctgcatcaggatgtgctgagtcaattgcaaatgttatcactgagaaaatgggtgctaaaagagttattctttcaatcgcgcttattacaactgttttcgtatacgtaggtgtatctggattcgtagtacttttcgtacttgctcctatcgctacaatcatgatgaaacaagcaggatatccatacagaatgattcctggaatcatctttatcggagctacatgttctgcaatgattccattcgcaatcaacatcacaaacattatgcctgcacagtatctcggtacatcaatgggatctgctccaatccttggatgggtagcattccttgtatcctttggtgttggatatttttatatggtacacgcagctaaaaaagcggctatcaaagagggaacagctatggatgagtcacagccggtaaagatcactcctacaagagatgaccttcctaatttttttgtagcacttatcccgtttatccttgtagtagcacttgtacttttactttctaaccttacagatatgaacacaaacgctgtagtagtactcagcatgtttgttggatctgtagcaatcgtacttctttgccacaaacaggttgaatcagttacaaaaatccttgaaaaaggtgtaaataacggtgttggtgcaacagttatggcggcagcaatccttggattctcaggcgtacttcaggcatgcccaggattcaattcaatcatcgattttgtaatgggaatcaagatgaatccatatattacagagtttatcggattaaacgtacttgcaggtatcctcggaagtggaacatcagctattgcaatgttcttcgagcatctttcagatggacttcttgcaaaaggagcaaatgccggagcacttcacagacttgcacctgcatgtgcaacaggtatgaatactcttccaaatgccggaggaatggttgcacagcttcgctggatgaagctttcacttgcagagagttactggtatgtatttgttacatctgttcttgctcctatggtaggttcaatcgcagcagtaattgtagcaatgattctctactaatcttaaatgatttattatttgcccgccaaagctgttattacaaggcttggcggtttttttatacaacagatattttcttgtatattttgctataaaatgaaaattgtgatgttatcgtatataaagtagaaaaatcgttattaatttgctaaaataaaaacgtgattttcgaaggaaggggatattacatggagaaaatactgcactatctggacgaatatcttgaagaaattctgatggtcattttccttatagcaatgacgcttataatgggtattcaggtgttttccagatacgttcttggcatgtcactatcatggtcggaggaaattaccaggtatcttttcatatggtcggctttcttaagtgtcagcctttgtaccagaaaatgcatatctataaaaattgaccagtttatacagctttttccaaggagaggaaaagcgctctggaaggtactcaatctaacagttgagtttgtgtttttcgtatatctgataccgtattcattcatatatctgaaaaatacgatagaaagcggtcaggtcagtcctgcctgcggtatccctatgtactatgtgcaggcggcaccgtttgtgtgctttatcattacagccttccgcatcgctcaaagatgggttggagagtggaaaattgtactgaaaaaagatgaaaagtcactcgaggagggcaatatcgccacagttattgaggaagctgttgttgaagacgcttaccgcgagaaagagcttgttgaggctattttaaaagctgagaaagaagaaaatactatatccggtaaaaagatcaatactaaaaacagaaaggagaaatagatgtcagcagttgcagtatttattttatttgtcatttgtttagtgatcgcaattccggtgtctatctctcttggaattgttgccgttttaccgggcgcgtttgatccttcgtttacggcaagcgcaagttatgtcatccgttccatgttaggcggaatcgacagtttcccactgcttgcagtaccaatgttcgtgcttgccggaatccttatggcgcacggtaagatctcccagaagctgtttgatgtgtttgtttattttattggaaaaagaaccgcaggaatcccgtgtgcagtgatcatcacctgcctgttttatggcgcaatttccggctctgcacctgcaactgtggcagcagtcggaagtatgacgatcccgcttctgatcgagcttggctataaaaaaaattttgcaaccgcaatcgttgcagttgcgggcggacttggtgttatcatcccaccgagtattccgtttatcatgtatgcaatggcaaccggggaatctgtcagtgacttattcttagcagggattgtgccgggacttatgatcggagcactgctgatgttttacgcttattaccattgcagacgctatggcgaggacaaggaaaaaattgatgcaaaggtaacagaactccgcgagaaaggttttttaaatattttaaaagacagtatctgggcgctgatcagtccggtaatcgtactcggctgtatctatgcaggaatcgcatctccgacagaggcggcagttatttctgtattttatgcattatttgtcagcctgtttatttataaatccattaaagtgaaggaaatctggggcattatggtggaagccatgaaaacatatgcaccgattctgtttatccttgctgcatccactgccttctcaagagtgctgactttaatgcaggttccgcagacagtgagcgcatggatcttagcacatttcagtaatgagattgtcttattgatcatcattaatgtattccttctgatcgttggaatggtcatggatacaacaccggcaattctgatcttaagtccaatccttctgccaatcgtgcagagcattggaatgaacccaatccattttggtgtggtaatgatcgtaaaccttgcaatcggctttgtaacaccgccgattggtgtcaatctgtttgtggcaagctcgctgacggatgttccggttatgcatattgcaaaaaaagcgatgccgatgattgggtactttttactggcactgcttttgctgacattcattccggcgataagtttgttcctgctttaaaacatcagagg

SEQ ID NO: 14300 - DNA, 97415 bp, Unknown
  gut microbiota DNA sequence
tgtcttttcttcttgccataaaaataacctccaaactgagtaattttatcttacatcagtttgaaggtttacacaaactttaggatactcccataaaattcaacaaggagaagatcatcgcatttttcaatgatcttctccttgttaaattattagcctttatcacttattttatgattcctttcaatgtagagcacacggaatctgtctcccttccggtacccaaacacgcgttgttttccactgtatcggaatttcattatggtctgtgggtatcctgtgaaccagtcgctcttgcctgaaccatgatatttcttatattccagtccatcgtccagatcaattgattcccatgattcatgccggacaaatttatccaatgtcttttttaacagttcatattcatgctgttccaaaaaatcttgtccggattttgattccaataaactgcagtctatccttgttccttcataaagtattttcagttcctcgcatctttctatactaagatcctttgaatggttctgtgcaagatatcccggtgaatatatagacagaactttataatctctgtctcccttctgtatacacaatacctgatctctgtattgatctgaatcaaaagacaaaagtgagctcttatgtgctactgcttctgctaatgcagttgccgtgacattctcattctgccacatatactcctcatccatatcgtgctgtacattctcatcccaatatggctttgtataaatttcttctgttaattgtatctggaaacgcaacagttcatctgaatttggctgatatttaagatcacatatttgcttgtcgcctgtgatgtaacatttatggaaatcgactattttataaatcctgttttctgtctttttatgaatgatatcaaaacatctgatattatttttcaaggattttaaaaacgtctcaacatcctcaaactgcccatgcagtgatttctcatttagtataaaatccatttaccaccccagaattacatctaaatctttcttcgtttgatcaaaaaatccatctctctgatcctgtgccttgccatcctcatcaatcggaatcaatacaggtacagatgttccattttctttctgctcaaaaaagtaaatcgtgactttatccgtttctatcacatctgtgtgaatatattttctcactgcgttatatatatggtcactgtgtgtctctacaataatctgaacacccttttctgccaaaaatgataaaaataacataaagtctgactgaccagacggatgcaaatggatctccggattctcaatgatcagaacatctccgctctggcaggacaacgcaccaataataacttctgccatataactgacaccggttcctacattcttcggtctgatctcattgccaagttctcttgttccaaaggatacccggatcagattcgtccggtcgatttcttctgccttcaatgtatagccaaggatcctctccagccaataatccacctgtccaccaaaagtaagcttggatctctgatcaaataccagtggattattctcccatttgtcaaaatcatgcattgcaagatactgatatgcgtactcacatcttacacctattctgtctggattatccaatgctatttcgtacgtgtcccgtacccctatacgatctgccgacaaatatctgactgttatttcatctgaaagcttgccctcacttatcacttcatttttgtcatctgtcatgcgtcggacgaatttatgattcactgtaatctcaatctctttactgccgacatatttattttttaattcactaattcgtcctatattaatatattgaccgcgaaaaggattttttccttcctggatcatcgcaagcagtgcctgtattacggtcgactttcccaatgaattttttcctgcaagtaacgtcagattttcaaaagaaaattctacctcatcaaaacatttcagtcccttaatagtcagctcatttatcatttatgaatctctcctcagataattaatccatcgattaatattggcataggttagtgatgtgtcacgcagactgctatacagataagatttctcatcaaataattcccttagatttccgcggatatcatccatacacagtgcgattgccagaaatattgccttaaatttttcattgaaaccccctctggtgaaccgttctgctctccagtaatcgatctcttcacacttattgcatacatacatggtgtgctctataaagtcgttaatatatctatcccgcaaattatccatttcataggttgcatgctccagcagatactgttcattgctagtgtacttgaactcatctacacctgctttgttcgtatataccatccatacaacgagcatgtagaaaatattgatttcacttagtcttccagccagtccatggctctccgcttttagcacttctctgattctttcaactaattctatccttgattccttatagataatcttgcgaatcttatattccctggtctctgtccaattttcaatgaattttccagccatcatatgcatgtatttcggtgaccggtattcgataatctgtaagggaactatggtgcgcatgatcataccggtcaatctgggattctcattgtcaatctcatagaagctcatgcgacgatttacatcactcggatcaatctcgattccaatattgttttccagatactgcagcagactgtatatcacatcctttgattccaaaagaagataatctccattctgctgttctgatacataaaccggtggcatcggtattccaagctcaattgcctcaactgcgttctttactatatttctggtcatatttctggttcgtctggtcggtgcaaataaaagcctgccatcctcattcatccacagaatatcctgaagtgtatatcttttttcataaatgtcaattacttctcgctcattataaaacatttttccctctttcaccaaaaacatcagctataatctgcccagaatccaataaaattctctagaacttcaccacaatataatcatcatattctctgatatatccttctgctggatattcgttcaattcctcttcctgctgcaaagctttctcataaagctctgtccctccccagatcacccggtatccacgctcttcaaatagacggatcatttccctgttatatccctcatagatatagaatcccggaattgcccaatctataagtgaccatgaaagtgtctgcacataaacatatctctccccggtttcttcctccatccagtcattgaggtctttaatcacagcgtatcccggtatgtcggatcccatggaacatttctcaagaattgcaggattcaattcataactgccgataaacacaaccggtttttctgtggtattatatccaccttttaaaagatcatatgctacctggtctaccactgcaagctcactctgattcttctcatactcgaaagcaaaccaatgattcagatcaaaagcagaattgtacactactgcgatcaccagaatcattcctacaacattcacgagccgatatctggacttcaatatcaggtacgtcagacagaacaataccatcgcagctagtaatccgatcatcagattcgaacgataaggaagtgcatccccctgtggaagcgatagtatgaaaatagatccgtaacaaaggataccaagaaacaggatatacacattcctttttttcactgcagctgcaagaatgataatcacaaataaaatacttgctgccacaaataatccaattggataatacgccagcccgacaaatacataatcccttagaatctgtctgataatggtaaggattctgcccggatatttcaagattcgcagcatacttcctgcactacgataactatatggctcaattccaaatactgccatacaggctctggtaatcagggatcgctctaaaatcgcatatacaagaattctgccaataagaaaaaggctcatgaaaaattgtttaaattttcgaatctgcatacgatttgcaccaaagcagtccacaatcataattaataacatcccggtaaggaatacatttgctgctgcctcataaaatccaattgctaccgatacaataagactcattccaaatttatgcagaattcgttgtttttgttccagattatgtgtatacaaatagtaaaaatcaaaaacagctagtgccacaattgcataaatgatcggcactccattctgtaaataataaatgaacacctctgcaatcagagaataatctaaaagcatagctgaaaataccgcatagcaggcaatcggcagtttatctccgagaacataccttaacactgctgaccacacaattgctgcaaacatgaaaatcagtactgctataaattccaatataaatggttcaaattccgttacatgaaatattttgttgatcacataaaatggccaccgtccgatcgatacgcccagtccatcgtcaaaatatagcccgatgcacacatcatcaatcccaagtgaagaatgcgtgatctcatacccatatcccgcaattgcagcaattataagtgaagccatataaattttatttttgagaaaatattctatctgtctttttaattcgtaaaacacctagatctcctttttaagccactggtaatactttctgattccctgttcaaccggtactaacggtactgcatgaatgctcatgatcctctcattatttaaaataatcttcttagcatctacacttcttgccggaagatattctacctgtggggcaagctgcatcgcctcgagcatccggatcacatctctctgtgaagttcctgtattagagctaatgttgaacgtatcacaatctccctgataataaaacagtgagatcaacatcctgcagacatcatcaatataaatatagtctctgacattatttccatctccccagatctcgattttctcactacggattgttttcttgatcgctgcatcaataaacccaactcctttattgaaatcctgtcccggcccatatggattagatatccttgcaattaaaatcttcgtatgtgcctgataattaaatgtgcggattgtattttcaatacaaagcttaacattcccataatgattaataggtctcggaagtgcgtcttctgtaatcggctgtatctcctgattgccatacacggttcctccggacgacaggaaaatcatctttatctgctgatctgtgatcatcttgcagagcttcgttgtctgaataaaatcccgctcatagccctgcagatatttttcatttgaatttcccggatttacggtactgagtgcatgcacaacatagtccattccttttaatgcatgctccaatgtatagtcatcaaagaaatccccacatatataattaacacctgctatctcattcgcaggttttgacatatcgaagcaatacacttccatattattatctaacagatgtctggagagattcgatccgataaatccggcaccaccaatgatcagtacttttttcttcattcttctatcatctcacttcaatatttgaccacttcactactaccaccccatctatgatcttgatggaaccatcacatggatattggggcatctcctgaaattgcatacttgaaataatgctatctctgttttccggttcctgataagtatatccacaatgtaattctatgaagtctttatccgcataatatgcaataaagtcatgcatattattaccatatccctgcaaatcaaccacatcgaactgccattgttccggaatagactcatccttacttccggctgttccataaaacaatactggcattttgctgttatagccatccagatctttaatctgtgatatcacttctgtgtaataagaaatagctgtttgttgctgataatcagctttaagataagctacattatccaacttcatgtagtatactgacaataatgcagctaccacacaatagagcatagaaatacttttccatatcttatgatgcaaattctctttttttaaaaataccatcggatataacagaccgatcagataaggatatatcatcagtgtatggatcacagtcttatcagatacagacattacatatataatactgaccgacaaagggatcatacagcaaagaacaaagaaataaatcctgttccataactctatttcttttttacatagctgtttgatcacaagtccacctgctattatataaataagcagatataagaaacgaatcgttctatgtgaagaaataccacacaaatcctgaaaaatcggttgaaagaaaccaagatatgcccttttcacagaaccaattagtgatctcatcgtgacgttcgccatattattgattccctgatactcaactaaggtaatctgaaatatcttaatacataccctgttgcacagaaagtataacagcattcctccaagaagagtaaacaaatatttgaatgcctccatgacattttgtgcaaagcttctgtcttccatatctcttaataaaatcagcacaaaaagtgatgttgcaactccaaaataggtttgataaattcccatggaaaatgcaattatcacgatcgccggcaaatacccatacggatatctgactgctgtataaacagccactatcataagcaatacagcaaacatataatagggtgctgtgaacatatatgcaaaaagagacgccatagcaggaaaagcaataagcaatgcccccaataaaactgcgtatgatttctgtctgatctgtaacagttccaccaaaagcacggcacagactgccgtaagaagaatacaaagtccaccgttccaccaggaactgctgtaattcaaaaatccaactttgttcattaccttttgtattaatcccagtgcccatcttccagaaccgaatgtcattcctactccgaaataataacagctgtcgtcatgatagctgattttatttgtaaaaaaataaccatgagccataaatccacatacaaatactgcaagagcggcacaccatttttcttttgctttttccatatacaacatgcctatttatcctttttgttaaatacaaatatcttactaaacacgtaattcagtattacaacaatgatactgaccagtatctttgccagaaatccctcgactccgaacaaactttgcttcacaccaatataatataaaagtggtagacctcctatctcaatcacacctgttgcaatacgtgctccgaaaaattttacaacttctttccaaactgctgtaagattccatgatctgctttcaaacacaaatagtttgttcgtaatatatgcaaagacaaccgctgtaaaccatgcgatggcattacttactgtcatattgacaacagaagttttcatcagcacactatacacaatccagttcaccagtgttgttgcaactccaaaaatcagatacatgataacttctttgtatttcaataaaagttctttaattttcttcatgattttccttcttataatctaataatttcttctcaatatagattggtctgtgttttccctgaatatacattcttgccagatactcaccaataataccaagaatcgtaagctggatacctccaagtaaaagaatcaacacaacaattgtcggatatcctggtaccggattaccaaaacacaatttctggattacaacaacaatcaaatagataattgcacacaaggaggtgaataagccaattcctgtcgcaattttaagtggaaatgttgtataagaaataaatccttcaatagcatatttaaaaagctttctgactgaccactttgtctcccctgcattgcgttcctctgctatataaggaatataacaggtattaaatccaacccaggaaaagattcccttagaaaatctgtgatattccggcagacttaatattgcatccacaaccggtctgcggaacgtacgaaagtcagatgctcctggatagaactcgatttcacttgtcttattaatgattttgtaaaacatattcttgagaccaccaactgcttttccctcatgacgctcttcctgatatgctgccacacagtcatattctttattttcaagcaggattttaaccatctttacaacaatttccggtctctgctgcagatctgcatcaatcacagtgatcagatctccagatgctttctgaaatccggcgtagatagctgcttcttttccaaaatttcgggaaaacatctcgattacaatgtttgcttcatgaagattgtataccttctcaagttcttcctgtgttttatccttacttccatcattgacaaagacaatctcgtattcataatcttctgcatcaaatactctttttgcctctgtatagaaagctcgtatgtttccttcttcattataacatggtactactaatgacagtttcatcctttatacctcatttgttttcatattttataatcttaacatattctgatccggaatgccagattattccccaaacacctgcactaacaatgcatttccgtcacttccatttgcaatatggcactgaaaacactgtcctgtgagcatctctttcttattctcatctgcattcaaagcatacactccctgaatctgactttcgccagtttctatccactcaagaagcctgtcgcttttctcgccccatgtcagtggtcgttttaaaaccagaatgattggcttggacttttcctcttctgttttgattttttgcatcagctgttcagtgattccctgattccgattatctatttcacagacaatatagccctcatactccttgctgtagaacgtatctgtccctgcaaacaatatctgctgctctcctgtttcattattgaaagcttctaatctgccgtttccgtaaagcagaaactgctgttctccttccgttccctgaaccatcacatcctcaacacctgcgatgactgttgcagtattccagtctgaattatatgtgtgatacagatctgcctgcgatcgttcctgatcgacataatataatgcatagttatctgtctgtccgactttcacgcaccctccgctatttaaagctactttggctcctgaatattcttttctgaccgcaatataatcaattttggcattgaccaatattccaagcatcagattgccgctggcatttggatcatcttctgtaataatgtgatagaggtacccacgctctccttctgttacaagacaaatgttcgcattatattctctgatgccataaagcaggctatcctctgcatacacgttcacacgctctccatcagtcacttcatcgatcagatctgctatctgtatctggtcttccggcatctgataaatattctccggcagccggaaccactcagaagtccccattcccgaatataagaacaccagacagcctgccattattacacatactgcttttatccatccactctctacgcgttccaggatttttaacaaaaaccatgctgcaagcaacgataccggaaacatccagagaaaacgataataggtgcttccctcgccgagttttgtaatgacgcgataagtcaactggttcagtattaaaaaactaaaaaacagaccgcccactgtataatatcgatattcttttttctttgctaataggtaaactgtcatcacgatcagcagtaaaccgatcggtgtactgtttccataatacctggagatgacattccatattgtttctgcattagtcatagttcttgccctgtttcctgtgttttatcattctttgcagcaatgccggtgtcagtaatacgacacacgctgctcctgtcaccagaattgcagttgaagaaattgcaatacatgcccataaagtaacggcaagataaatatagttccatttatcagattttctgatctcttcaatacatagataaatagtaaaaagtattaaaacatttcctgcatatgctttcccttcatatgctctgtgcagcaggaaagctgcacttgtatagattgtgttatcaaaaagaaaattgcatgccaatgcaaggcaggtaaatactcctgctttccagaatgcctcttttccttttccaagaaatgttctgcctagcagataaacacttccggctgacaaaatcacatttaaacttgcccttgtgattcttgtgatcactaatggatgaatatggtatattttacacgcaactgctgtattaatatcaaacgtaaccaatgctcttctcatataaagagattttacctgctccccggtatatgcattaaatctgtataaccggttggatgtcagtgttgtgttaatcagaccaatataataagtggaatcatcatttatctctccattaacagacacataatagcacattacaagcaggaatatccccataagcagaaaccatattttgtgccttaaaaaagcatttcttaccatcccaatatcttccatgatccgctttcggcactggattcctacccatatacaacagatagccactattaaaagccacaggatagtaagtcttgtcagggtctgatccatttttatcatcggcagtgcacaaatctgaaagattacctgatatgtaaggaatccactgatcaccttaaataccatcccatgcttttttctgcatagcagttctaacagggaaccaaacaaataatatattattagctgtaacagcaggattataattgctttcattacagttatcattctattttatctccatttatccgtttcttttctcattaagcttttcccttacgaatctaagataagctttccagaacgtaatcactgaatcgttttctttcagctttggataacgcttcatcaaaaaatatttatccggccatagtctgactcttccatagcatacgaactgtaaccatttctcttctatcctgcatccggctgtacttcccatcttctggtaattttcagggatttcctgccataatggtaatggcagtctgtagttttcaatttcctcaattccttcataaatctcaatctctgttaacccagcctgctcaccttctgttgcttccagagtcacctccacaaagtctgttggctccatatccggtatattgataatggttcgccctccttcatgcatgagttcatccgtatgcatcacatatccgtttccaaaggaaatttttactttattcacagcacaatcatctgccggattttcaaacaggtgaatttcctgtatcctcgctttatgatcaagtgtgatcttaacctgcttcttctggtcatctttttccggtatccagcttcctgtatcataattccacattccatgcatgatatctgaacagtccgcacacttaaaatcattcagatatgccgcatttcctgaactcacttcaatatctgcatgataagtaagactctctgtaggtcgtctccagtataccatatcaagatttataaactgtattgccttcatatccacactctgggaatgatattgtttcgctgctttatatagtacattctttcggataagtgcagtcctgcattgccttggaactgcaaatcggatccgttcttcccatttgtccatcggatgaatatgatctgtcccatctgcttcatttacaagctctgtcacatttttatcatgatagtaatcagcatgtccttcccacttcccattataagcctgtgcctttagtaccagaggatgccacaatttttcctcttttagcagttcgcccagcacctcatccaccattaatgataaagccagatgatccatatgattgtcccagtctgttgtcacaagaatcttgggatgatactttgcaattacagccttgatatcgctcttatagttttctctggtatatgcatgatggacaccatactctgtcattgcaaattccggtgtctgttctgttccgtaggtttctgtcttcccattgtaagatgctaccagctcatccggtgcactgttatacaggtgcttcgtctgtgtctgatctccatatcctaaaaagatgatgtcctccagagtcactccaagctctccgagtgctttaccggcctctttgatcctgattgttccttcatgtctaaagtagtctccatttgtgacaaatacgacttttattctcatattctgttgtactgcaccataaatcatggcacctgcaattgcaagttcatcatcttcatgaggtactattacaagtaaatctgtttctgccatattcactctccgttccaagtacagaatctgtcactttctacttaccatacacacgtacggctgcttcataacttctttttgcgtagttacgcttcaggtcatttcgattcggaatgattttcctatacgcctgtcttaagaactttttgtatttgttttcctctttaggtaattctttcttctggagcttcatatgtgtagctcccatctctttcataatcatctgccatccggtcacatgcaccgtaaaaagctccggtcttgccttatatgccataagtaccagctgctggtcatcatctacacagtcaagcattaacaatgcttccattgcatttctcacaagatgccagaattccggtacaagctctcttggcagtccatacatacatcccatcacacagtcgtcctgaaactgaaggctctgcatacctatcactgaatccggatcatgtaaacaggaaatgtggatctttccaccaaagtcatagttccacaggaaatcatagtctttttcatcacaatacgtaattccaccatggtcgaatccgaaatccatccagacaacatcttctgtcagcagtcccttctcataagcatcgttcatgaagtagtatttcatcatccacagatagtcatatttaggattatttgacgacgcctcctgcaaataacgaaaatttaagaaatcgcagtttttggatgctttctccattcgtgaaagcaggtttccttccagttcgaaaagattatctgttgctatgataatcgtcttgtctgaaagaccatactcagcacggatttctttaattatctctgcacttttagaatctgtataaacgatcagtctgttctgtattcttgcccaacgtctgaattcatcaaaatacttcgatgctgttcttcttaattcttcattcttatcctgtcctcttccgatatcaaaaaaatcggttacaagtgttatttcacccattcctgttccttccaatccattttattctaaatcccgacaacgattgtgccaaggactggcagctgatgttctctgcagctgatcacttcctgatacatctctttgtatctggattttctcattgcttcaataagtacaacctgtcctgtctctgccatttcttcaagtgccttcgcataataattgatttcttttcctacgaccaatgtaagtccgttggtctgacactctgtgactaatttctcgataatgcctgccggaatttctgacagattacttcctgtaagatatgccttctggttaccagatgttttgcaaattattttcaaattggcacagatcagttctatttctgtttccaatgataattttcctgctttaccatatcttgcacctgcataccatctgtcaattttattatgttttcccttcatgctgcttcggattgttcctagtatattgctatgataaagagtcttgatttcttcctctgatcgaagactgccggaaaacagatattttaacaacacaaagatacatgcaagtaccgcaccaagtattccaccgattacaaattttgatacactgatatgaacattctgctgtactgcagtgttctgtgtttcttcagtatccatctcagctacactgtctgatttcggctctgcggtattctcctgtggctgattctctgtatattccacataaagttctaactgattgccattcattttactcttgatcgtatccaggtgttcacccagattcttaatagcaagtgctgtatcatcctgtaattgtgcaagttcctgatctgcgatcacattctgactctgtgaaagaagctgcaattgctgtaccgggaaattttccgtcagtttctgtgaataaacatccagaccagactgtataatttcagccagttctttgcattcctcctcgttttttccacggatacgaacgctaaagctgctttcatttgtctcttttacgtaagtattgttttcagaagaaatggaacattcgatcagttccgacgcgatttccccatttaaaaggtaatcctgatacattactgcgatctctgctgcatttccagaatcgcttttcaccagatactgtaataaaattacatattcctcatatgcattaatcgccattaacggagagcttttcgcataggtgcttttctcatccagctgctttttgattgcaactgcaccataaacctgatccagatcctgtgctcctagagatgcttccatctcctccaatgtcttgttatattcctctaccttttcatctgtagttaccttcgcattcctgctgtctttcacatactgataaccacatagtaaaactgctccgatcaccagacatactgtaattactctccagttacgaatgagttcccataaaaaatctgtaatctcaagatcagtttcttttcgtttggttgttatattgttttcgttcatttatattcctcgctatgtcttgatccgctgtgagcactgctcactgtttacacacattatatcatgaatttcaatgctggtacatctttgagactattttgactcccagtctggttgaaagtattccagccagcagattttccttgctactaaaagttgtctttactgcctcctgaggcagttctcctttgtattcttcccctttaatgtgaatatcaatctttttcgcaatttcagcaatataattatcagactgtttcctgagtttttcattttttctcacagtctgcttcatacctgtatcactacgtcgataccagaatccgattactggcacatgaaccggatgttttccagcttctaacagtttcagataaagtgcccagtcctcatcgtaatgcttccatttttccgggaagcagtctatttcctccaggtctttcttcctgaatagtgctgcattcacaagtgtattgttgaaggtcatccttcctgctgaaaaaggcttgcaccagatatacttctgtccttcgaatccaacaagatccgtataactccacgatgcatccggatgctcctgtaatgctttgtacaatatttccagataaaatggttcaatcaggtcatctgcatccagaaatgcgatcacgtccgctttgctgtttctgatcccattattttttgctactgactgtccctggtttttctgtctgatcacatggatcctggcatctttttcactatattcttccaatacagcaactgcacccggacgtgagcttccgtcatctacaatcacccactcgaattcctgcatagtttggtttatcacacaatgatatgtctgttcaaaattccgctctgcattataaaatggtgtcacgatcgagatacgtggtctttctatcgttttcttaatatcagcttttgtctgtatctttcccggttcatctgcaaaggaaaattcctctatcgttttcattgctcgattcctttcttcagataatcaacagacttacttctgtaactgcaaagcctgtctgcaacactatggtaatcaattacctctgtatcatctatttcgttctctgccttgatgtgcctgctctccagattcaggaatataagcagatttgttatgcggccgttttccttgtatacactgtagaattttttctgaaataaaatcgaaaataccgttccatggaaagagtttgtaaatatcagttctgcatcacggatatatgtaaggaactctctcggtcctgcatcgaaaattatattttctccattcaactccggtgtttttttataatgcagctcgatcaggcggtatcctgttatctctgccgcttttttagcacatttatctaacatctcattttctaccacaaaatatgcaaatatgtacttttcctgtaccagtggtttttcatataacagttcctcgtaatcattcttttcaagaagaagtgtcggatccacaactgttgtcacttctttcccgacaagcttttccactgcctgtgccagtttttcttctctcactgatatatgtgctaaattttttaatgactgtctgaagtacccctgctccgcctccgggatgttgccgtttggcacactggcagcataggatattttcttgtgctccggtgcgaattgcccaaaataaaccggatcaaatccatgtgtcagctctctcgcccagatttgatcacttccaaggatatatacatcacactgttctttctccagatctttcatagtcagtttcttagtctgtccatccagcagatgatcctcaataaatctttcaaataccttccactggctttgccattcctttaaaccatagaaattttccccaacttcccgaatcacttttccccatcttgatgggagaatatctcttttccagaaatcgatatgaatcactttgcgatataatcttgcaatataaggattgcggtaatttaaaatttttgcctcataccccatccggtttaatttcgtctttaacgcatatgcctgtaatactgcaccatagttatgtgcattgtgaaatgtcagaattccgatttttttcttctcactcattattttcttacctttgctctgattttattaaccataatatcccgttccatatgatttaacagcaggaaaaagttcacaatacagccagcgatacctgcgatcacgcacactgcaaaaaatgtgatccagttgatcggcagcacatataatgtcctgattccaaagaacacagccatcataattaccgttgttccaatatatctaaagatgatcggataaaaagtattccattttatcttaaggcatttgcacgcatacaaaggtacaaagataaggtttccaagaattcctgtcaccttgcttacccctgctaccgcataaatttcaagtgatgtagtgtttaagaagatgaacaccaaaagtacattggtaaaactgatgatcaaccagaaaatagaattcaccttcaacctgtttgtcacaaggaatacgttgtttaaggatgtcgttacaccggaaaccagaagactcatcatgatcaccacaaggagagagtaaatcagatccacatcctgattcggcacccatagctgcatgaaatatttcccgaaaataacaagaatacaaaaaataatattcacaaaaaaggaagaaaacttcatggaaagcttcaattcctttaccactgcttctgtatcatccttcgcatagtacatagtaagattcggactaaacagattaataagtgtattggtcagtgttgaaatataggttggtatctgttgtgcgatagataattcacccatcagatatgcactgatccagatatttgtaattaccagatccagtccatccgaaagaacctgcgacagtctggaaatagagttccacattccagcactgataagttcttttaccttgatccaatgaacataacattttttcaaatggatatccggtacgagcagtcttgtatagtacatattcattaccagaccgacaaacgtgcagatacaggttactatcccgatgtaggctacatttggtggcagcataccaaacagcagacacattaagaatacacgaagtactgctgtcacaatattggcgatgctgcttaagtataagcggttcgtaataaaagtcgcaacattatataccgtactgatcaacgtgataataaagttgaacaggataaagaaaaataaaagctttacagacccttccagttcaaccggaatatctaacagtttctccgcatttaagatcgccggtactgcaactgcaagaataaccggtatgatcgctatatttgccattaatacagatgaaaagtattcattggcttctttcttcttgccctgatgatactcaatcgtaataaatcttcctgccaccgaattcagtgccacagtaaggattgtaatatagttaatgacgttatttccaagacttacaaacccatatgcttcttcccctacagtatcggtcagaaatggtgtgaagaaaaatgcgatgcccagtcctacaacaaatgtcacaaaacttgcaattgtatttatgataagtgccttatctttccccagttctttcatgctcaaaaacctctatataatcttcgtaaaatttcttttttggaaatttttttgcacgctccagagataacgcgctcatttctatctgcttctccttatcgtctgcaagacgtataatcgcatcttccagattttgaacaatattctctcggtccacccatactgccacatcagaaggtgcatactctatcattccaccagactttgtgataattagcggtaatcctgaaagcattccctcaattgcaatcaatcccgctgcctcttcccacaatgacggaataacctgaatatctgccgcctgataataacgatataattcacagttctcaatatatccagtaaatctgacatgttctccggctttctttactaatttctgcacttcctgtacatagggtgtcactacattatcaccaaactcagcactgcctatcataagcagttttatatctgttctctttaaattaatcattgcctgaagcagttcttttgcaccttttacttgtataattcttccacaaaaaagcagaactgtatcctctttcttaaatccaaattcatctcgaattttttttctctcttctggcgtaatacgcttcttaaacttgtcctcattcacacaattatacacagtgtaagcctttacctctttatcttccgttgtttgcatccattcccttgtagcaaactggctaattccaatcacacttccataaatgtgatcaatgtatggttcacacagaagatgatgatgaatatgaaggtatatattttcttttccaaattcttctgaaaaccgtttgaattcatgatataatccaccctctgcaacaattgcatccggtctatgttctttcagataacgaaatactctgcgataataagcaatatcaatccatgtcttgttcttaataatccgattactataacgtatcacacgattaatgatacgatccgccaatgtcgtctttggaagatatatgatttctgaatatttataattctctgcaagcgccctggcctgctcattttctgtacaaaatactacaaattgtacctggtgttctatttcgttttgttctacaagtatggtcaacaattcttcaattgccccaccctttacagctggtaccggacctgcttccggcaatactaatgctatttttttcactcatttatcctcgcatacgtcgtgctaatgtccacaaatagagatctggtatatatactttcagccatcctgaaatcttccgatgcctgtcttttgtctgtaaaagtgcattcttatgttctcttgcaaattttttgcaatatttgaattcagctttgtactgttttttcttctctgaagacaatgcagcatatttttcaaataccctgcttacactgcaccctatcagattaatatctgcaaattccggtgagattttcgttaatttctcataacacaattcttccactctcatagcttccagatatttatcctgaaattcctgcttcatcgcacttccagcataaatcatataatgataaaatggatattgaatcaatgaagctctctcaaatttttcggaacaaaccacattcgtgttaaacaataagtcctctgccactttatattcttcaaactgaatattttcaattaaatctttgcgatataacttacacaccggtccccacacagtaagcagtgcaagaccactctctgttttgttttttccatgaataattgtacgttcatttgtagtgcagttatccttttcttccagttgattttcttcccgaagcaagcagcatgctacatctgcatgatctacctcagccaatcgatacagactttccagcatatctgcttcaacccaatcatctgcatccagaaacatcacatattttcctattgccaattgtattcctttatttcttgttcttgcaacaccttgattttcctgctcataaacctgaattctgttatcctgtcgtgcccacctatgacaaactgcaagactgtcatctgtagaaccgtcatctatcaacaatatttgaagatttgtataagtttgtccacaaatactctccagtgtatggggcagatatttttcaacattgtatacaggcacaacaattgttattaaatcattcatatattttcctcatctatccgatcttctacactctttctctttgtaaaatgaatatcaccactgccatatccatgaagcactactccaatccaatgtaagaaaatggaaaaagcaaaagccaaaatacaagttgcaattccaaaaatcatattattaatcgtaccaccatcaaataacaatttggtatacggaacagataaaatacaaagtgccaatacgtttcttttctttaagaaatatgtaagactccattctgcaattgcaaatggtatcaacatatttatcaccgcaccaactactccgaaatttgcatagccttctgcaataagtccaggttgtgcataagatgctgaaatgtattttgccgaaagaagtggcagactcacatattcgaatccgaaatatcccgcaaaactcttcacgtaagtaattccatggaaaaaaccgtgtaccttcacatgctggataatattacctccaagctccgtccagacaccaaatagcctataaacctgtcttacacatgaatcataaatacttttgaaatttgtgatctcacttaatatattatagctcctgtcataatagagatttaacttcaccaattcagataccattccatatgccataacaataaaaatcccgaaaatcaataacggaactaccttttttccttttttataattatcattcactgccgcaaagagaaagaagattaataacaatggcatgatatattgaataaaaaggaatcgattagttcttacccgataaaggcaatataaacctcctaaaagaccacccactgtatacaaattaagatttccatgtgtacataagaatcgggctgtaaagtaacaaaaaaccggaacatatagtacaagtccagctgtccccaatctaaaattaaaaaacaaaataacaattcccattaagaaaacagtgatatcatccgttctcttataccttataaaatcactctgtttcacttcatctgtcgtctgttttaaacataacagatataggagtattactgccataataataaagtatactcccaaataaagtagaaagaaatcctgtggttcctgtactccctctctttccatctcccttaatctgctatctgtaaaataccccgggcataaaactccgtcaataaacacgttaatcagtataaacaaataccctgcactgaatatttttcgctttttctcataaagaacagacactgctaaaaacaccactaacgatattaaaagcaatgcacacctctcccagatatgttcatctccaaccataacttttttatccaacagaagattcagacagataaatatcgtaactgcgaccatcccggctcgtgtcacctgaaacattttttttgtcatacataccgctttcctaaactcttgtcattcattaataccatcacacatttcactgcaagtttcacgctctctttccaattatagagatatggctttgcaaaaattttccagaaatactttagaatatcttttctcaataatcttttttccggttcttccataacttccccattccttgccagataaagcacattccatgccagacagctctgtatcacaggtgtcagaagttctccgtcttcttttgcctgaaaataatctatccgctcatgccacatttcaaaataatccatgcaatcctgttttttataagtaactcccataatggaatctgcacgttgtagatagtagtatatattttccggaatacacaccacacattcctgattctcataaactggcacaaacacatattcatcttcgtaatgtcttccacatgggaaacgcagttctttaaaaattttagcatcatacaaagccccccatgctgtaacaagtacccattcaccctgaagctctttttttataatctctcttcccgtataaatctcctgcttcttatcttgtgtcacatatatttgctctgtaactttattactctcatctattatctgaattccacaaactgcaattgatgcccgattctgctgtaatgcatcatacagtttacagatataatcctcatcaataaaatcatctgaatcaacgaacgccacatactctccctgtgcaatatccaatccggcatttcttgcatcagacaaaccaccatttttcttatgtattactttgattcgattgtctttgttctgatattggtcacagattgccggacactcatccggagacccgtcatctaccaaaataatttccaaatttccataactctgacggagtaacgaatcaacacagattgtaaggtatttttctactttatagattggcacaatcacactgattaatggtttcatttcatttcctcatacatttcttctaaccgccctgcttccacacgaatatcaaatccatgttctgcaagttctttttcaaaacttcgtcttgtctttccgcttttttcataacgtcctgccgctttcactgttgtcttagcccattctgccggattttcatccaatgccaggaacgaactgcccatcacatctacctctctggtaatcgtatccgaaaacacacatggaagcccacacgcctgagcttctacaccagtcataggaagcccttcaaataaagatggcatgaccatgacatccattgcctgatataactcttctgtgttatccaccattccgaatatttttactgaatttatcaacccgagttgttttattttctcctcaatctgtgggcgtagctcgccatctcccaccagccataatacactgtctttgtggatttttcgtatctccgaaaaaatatctaccagatacatctggtttttctgttggctgaaccggcctacatttccaataacaagcttattttttgcctgatactgtgttctgatttcatttctcgccgcctcgttataagcatattcatcacagcagattgcatttttcaacacggtataatctttttttccaaaaaggaacgctcctgctgcctgcgagcatccgatccgatcggtaatgtacttttgagatatgctccaaagcattctattccgcaccgcttttcctttactctccgcatatacagttgcatggctatgtacaattcgatgactgattccatactttgctgcaaccggcagacataaaaaagcaatatagggtgcatggagatgaacaatatcatattcactgtgatgttctgaaaaaaactgttcaaaatatttctttgtctgtctcatctgtctgccggacaatgccggataagtataaactcttgagccaagttttttcacttctttatcaaatgtctcttcctgctctccgaagatcagataatccatctggacacgttccatattcatatgtctctgataattgagcatcactgtcccgacacctcccaccgggcgttttccaatgatctccagcacacgggcttcacgcatgattttttcctccatttatgccctaccctttaagcatttatagcataattttctttacataaaagaatttttctatgaattttttcttagttattcagatttgcgcaaaaatctcttataagagtactccttcatccaccccggcatcatgagtacaacaaaagttccaacctgcgcctttatatattcaaacgtatttgtaattcccagctcgtgctgctgttttctgagtttttgaaagtccttgtaataagcccatccacttcttcgctttactaatcccatgcttgttctcgcccggacaagtatatcttccatgttccggaactgatatccctgtgacaacatcctgctccatagagaatagtcctccagaaatggaaaatgtttataatttcccgcttttaaaatagaatctttcctatacataactgtcatgtgatttaatggattacgcactttcacatactctaaaatttcttcctgagtctttggcatattcttgacgcggtctatggttccttcatcattaaattcccggatagcaccacctaccacatccacttcaggatgtgcttccatatatgccccctctttctctaatcgatccggcatcgcaatatcatctgtatccattcttgcgatcagatcatatttgcataattccactccttttgccagtgcacgaccaagctgaacattctgttccatagcatgcacatggagataatcacattttttctgatactccgccactacctgatataattcctgtgtcagaggtccatcttcgatcagaagaatttcatctgcagtcctcgtctgaactaatatactttctaatgacgctcttaaatattctggattttcttttttataaacagacatcaatacggatattttactcatattttaaaactattactccttcgctttaattttaataatagtgccgtttcctgcaaagcttggatctatcacgcattcttctattttatcagtaagcattcctttataataaaaatgattatctcctgtaaaaactgccactacagggctttcatctgaaaatgccatcttcataaattttcttgtaacctctgtagtatctcttgctccctcaccgataatcagcggcactccccatgtattaatcgaagcttcctttaaatcttctatctgtgatgtgtaaaatggaacatgtgccagcaaaataattggcttacccttttccatctctttttgcattgcatccagtgcctccggtgctacctgatatgattgattatctactgcacatattgtaaactctggaaactcccatgcttgaaatgctgtgttattctctctgaacaaatgatatatctccgcatcttctgcaatcgtttcattccacggtgaatacatctcatgatttcccaacacgtacaaataaggaacttttaatttctgaagattgtcagctaaaaattcaacattttcctgcgaataataatctatcatatcgccacacattaatacaccttccggcttcaagcggttggcatatgtgatccattctgtaaactgtgtagacgaaagtattccttcctcattaacaaacgccttcattctttcatctgcatcacccagagaagcgcccagatcctgtttcgttttaatagccatatgcatatctgttaaaaacaaaaaagtatattctttttccactcccggaatgataaccgtctccgtattacttaccttaatatccggcaatggagcatagtacgcattatacgctagcacaataaaaaatattagtgttacaatcacagcacctattcttttcataatgactccttagatttttttatactctccagaaaatccaccacttcatactctcccacttcttcctgaaatgatagtttccggtcataggtcaggctgccaaaaacctttgagaatatgttaactcttccggcaagcttaccgatgatccactcgaatcccggaacgagccatatacttcttccatagctttcggcaatccgtgctaccatatctgatgtattcacatattggctgttttgtgggcaatagataccatctgcatctcctcttataatccgacataagaactcgcacaaattctcgatgtatatcatgcttctctcattgctcactctcggaaaaacaggcgtcttgcctgccagcttctccaatgaagcataatttccggtacaagctttcccataaatcattggaggtctgataactgctactttgaatgtaccacttctttgctcacataagtaccgctctgcggcaagcttgctttttccataaaaagtaatcggtgtacattctgtttcttctgtaatctgtcccattgtcattccataaacactcatcgtacttaaaaaaacgaactgacgaaccctctcagcctttgccttatctgcaagttcttctgtcaattttgtattaactgcataatagagtgcctccatttccggctgttctttctgatgtacaattgcagccacatggagaatcgtatcatattttgaaaaatccattttcttccattctgaatttctcacagaaacaaatgtaacatgccatcgttcttccaacggcatgtttccattttttttctctatatactgtttgaatgaagtgccaacataactgttggttccggttatcaaaatctgttttcccattattttcccccgaatgatccggcttgtctttttatccgctgctactagctatttatgcatttctccggttccaccttccacaacacctttgtgtgacaagactgctgtgatcgttccaaaaaagcacttcagatccatgatgaatccgaattttttcacatactcaccatccagttttgcctttacatctatctctaactcatcacgtccgttgatctgcgcccatccggtcagtcccggtattacatcattcgcaccatacttatcccgttcctcgatcaaatcatactgattccacaaagctggtcttggtccgacaatactcatttttcccatgagaatgttgataatctgaggaagttcatcaaggctgctctttcttaagaattttcctactcttgtgatatattgttctggatccgatagcatatgtgttggcatatcctttggcgtatcaattctcatagttctgaatttgtagatcataaagtgtgtcttatggattccaacccttttctgtttaaaaaggattggtcctctactatcaattttaatcgcaatgcataaaatcaaaaacaaccaggataacagaattaatgccatcgtcgataaaagaatgtcaattattcttttcactcccatataaagtttctgtgacattgtaaattgtctcatctttttgattcctttcatgtatctgcaattatgcaagcatcagacaataaatagatatacctgtacctatcagcattaaaaacgctataagactctgataattctctaatttcatgctgcatctcactttttggtttataaaaatgagactcagtggaaagattagcggcaaataatatcttggcgacactccgttaattaccattgatcctaccggtgtaaaatccagatataatgccgtccagaccagacatgctgttccaaatattaatactgcattccatattttcatcatgaatatttttctttttatctgtgcatcatatattttttctgtcattccaaaatccgtcacaaatgtaaacaacatcgtaagcagtactacaaaatatcctattccatcatagattccacgatatgcaaaatttgcaagcactttggaaccaataaaataagatgcaaacgttgttccaagtgatttcagcaaaactcctgtatacgtcaacggatatctcaaaatcatagataactgacttgtctggctcgtatctcctccacggtaatctcctacctctgctccgcttgtaacattgcctattaacggcagtataaaggacgcaaacattaatattaataagacaaagattcctgctttaaacagattcttttgtctcctgctataaaacttgtccttcggcataagccaatataatgccaaaaatggaatatagaccgcctttgaaaagcaacccacaactatagcaagaatagataccatcgtccgttttgtttgaattttttcttcactcaggtactctgttacaaacaatgctatgcccaacattaaaagtgctatcacaaatgcatcatatgtaaatgacgaaaaaagaaataccgttgttggcagcaatcccacacacatcaatgtacgttttccatacttgctgaaatgaatcgcacacgcaacgacagccgtacaaaacagtaaattaaaaaactttcctaaaaatactgttgctacataagagaatccaagttttcttcctaatccaagtcctaaaatttgtggaagataggccctttcattatatttaataaatcttcctttttctgatgttaaaaccacttcatcttttacactattgagccactgcccaatccattgttcttcctctacagtatcgcctgtaggaactttcatctctgcatttgccatcgccggattcgtataggcgaccttgtttcctaaccaggaatctgtgtacgcagtgtgaaaatggatctgttcatcccatgagtcaaaggaatgatgtgctgacaaaataatcactgttcccaatgctatagaaatgatcgcatacatccattctggtttcttcccccagaaatctccatggaatacaaacatatatcctaatgataatccaaagacaagaagcaaaaatcttgcccaatggaatactatccgatttacaaactgaacagagtcgcatacctctgcatctgcataggaaattttaatactaaattgctgcactcttgcattaacaggtattgcagattttcccaacaaatgagaagccgtatctgttaattctttttcctccttatttccataaccatcaaaatatatgatactaatttctgattcgatatctgtatcactttggaaattcaaataagcagaactgacataccttccatcaagattaaaactataggttcgctgcccccatttatttgtaatctcatccgcactatctaaagaataagtctgctcaaatttctcgtttttaaacgaattccattgtaataaaatatgttctgccaaaaaagcgaacataattatccctaggataacaaacaaatctctaagatacttttttttattctgcaatatctgctttatctttttcattcttctgctttcctgtttcttcatcctgcttttcctgcgatttttccatattattcttatgatcgagttgtaagataaacatcattccaactagtgcaagaatcagtattagttcccatattttttccatatatcatacctgttttcgtatattgaacaaaattattttaaatcatcgtttaaatctatacgcttgtattaccgattctgaatagagtatgttggcaccatccgctgtacccactctcgaatatcatccggctcctcaacaacatgttctttgatttcctctaactgttttaagaatttatcctcatccatctgaattggctttccaatatgaattaatttgttggctgtttcctgcatgccttcttctttcatgagcatctcttcatacagtttttcgcctggtcttaatcctgtaaatacgatctggatatcctcgtcgggtttatgtcccgaaagaagtatcaggtttctcgcaaggtctacgattttgaccggctctcccatatccagaacaaagatttctcccccctttgcataggctcctgcctgtaacactagagatactgcttccggtattgtcataaaataacggataatatccgggtgtgtaacggtaaccggtccgcctgcctcaatctgcttcttgaataaaggaatcacacttccgttgcttccaagtacattaccaaatcggactgctacatattctgtcttagaacgattattgtatgtctgaataatcatctcacagattctcttggtagctcccataatattcgtcgggtttactgccttatctgtagagatcatgacaaaacgtttcacattgtatttatctgcggcctgaaccactttccatgttcctaaaacattattttttactgcttcattcgggctgtcttccatcaacggtacatgtttatgcgctgccgcatgatatacgatctccggacgatatttatcaaagatcagatccatgcgctttgtatttcttacggaagcgatcaatacgaccagatcaagttccgggtaatttctccttagctcctgctggatatcgtatgtagtattttcataaatatcaacgatcactaactgttttggattgtgtgatgcgatctggcggcataactcgctaccaatcgaaccacctccaccagtaaccataactaccttatcagaaacatatcccatgatggaatcaagatcaactgtgatcggatcacgtcccaaaagatcatttacatcaacatcttttaatttgctgatactgacatcgccatttaccaactgatacatacccggtaaacgttttaattcacagcctgtctgcttgcagatatctaaaattgcctttgtctcttttgcactcgctgttggaatcgcaataataatctcatctacaaggtactctttggcaatttcaataatatcatttctatcgccaagcaccttcactccatgcatatattttccgattttgctcttgtcatcatctacaaaaccaacaatatgcatatttacaaaacggcttccagaaatttccttaataatggaatttcctgcctcacccgcacctacaacaagcactcttttcagattctttgcatctactttttttccaaagaatgttcttactgcacgatacgaataacggctgataaacataaaagccaataatagcgttccataaataaaataccagcttcttggaagtggatactcctgatctctgtagttcaaaagaatgttcactgtattaagcagtgtatccacaatacatgccgccgcaagatacagcaattctgttactcccgcatatacccaaagactactgtacaaacgaaatacataaaatacgatgattgcaatgactaacgttgccggtaatgagctccatacaacgccaatataatacttcggtacggctgaaagactaaattcaaatcttacgatcaatgcagcaatactcgttaatattacaatgcatatatccatcagtaccataaatattcgtttgatccacaatgttttatctaagtttttcataagttcgccacttttctttataaattattttgcatatacttcatattgctctgtgttataaattttactaaaaccaatgctgttaaaaaattgaatattatcatactcagtattaataaccagacaattgcacccataggactctatttccaactgcagctgttccagattctcctgtgtaaaagacaatccttcaccataaataactgcaaatctggtatcatattcacgaagttcacccgccacctgaactggtgcgagaactcttggtttttccacaaattccaattgctccgctatatccattacttcatttgaaaccttataactatttgcaagcaattccagatgctgtgaagtatagtttaatcccattcctgcctgaagtaaaaaaatatatatgattattgcaattattttttccttcttagatggtatatttatcagatactccgtcattacaaatccaacaaccgatactatattcaagataccatatatcatccaatcatctgcgtcctgaccactcatatgcagtatgccatttgcaatcccaggagtcaccagaaaaaatataccaaatatctcatatattaacaaatttctctgtctttttttattcgtaatcaataaataaatgattgcaataaacagaaaaaaaacatttgtccccattccattgtaagaaaaatatgcatttctaatgtcttcccataacccggacatactcatacccctttcttacaacccagacagaaatcatcagcaacgtcattaagaatatataaaaccagcctttgtaatgtaacaattgtgccgctggatacaatataataaataaacctatctgcatcataacaggatattttgcccaatcagatctgctgtttttttcttctctgcacaataaatttaatacgcgcatcacttgcaaaaatgcatacggaagcatacagcattccaacattacgcttccgttccaacagctccgaaatatacctgttaccggattttctactgctgtatataccggaatataatagatactttctattacaatcaaaaacactgcctgtcctttttcctctttaaaaagggacgttcccagttcccaataacagcacataaaaaaagttaaaataaaaaacggaagtattacttttatcaataatgccggatgtattcctgaaatctgtgccgtgactgcatataacatttcatacggggaaaatatcttttctaattgcgttgctggatattgttcacccgtatatggctgatatatatatgcagaattcgtgtctattgatgtcataacggtctgtactgtctgatccaattgtggttttacgcaaaatacagaaaataatattgcgatgaatgatattatccttgcaatttttatagcattacatttattttccaatgctgttcttcgttttaaatattcccatattgcttttttatttactaaaatggataccagacatatcgtaatggttgcaagtatccaaactacactgagttttcttaatgtacagcccctgtatagaaaaagtaccgcaacacaccaaaacatactaagcatagcaacaaaaccatttgcatatgtgcctgatatgtttttcttttttacacctgccacagcatctatcaatgcacctgcaaataatggtactaaaaaaaataaataaattaccagcaatagtcctgctgcatttttcattcattttctcccaacactttatctactttgcgttccaacaaagttttatacacctttgttcccttaatatattccaattcgttttctactttattcatctggcacttcagttcaccaagtgctgtcagcatcggattgtcctgtaagcctgcttctctgatgataaattccacatttatctcgttcagattattttcccattgattttcaaatataatctgaggatcttctgaggtaaatatgaaatctccgtcttttgctatgattgcattgtgccgatagtgttccatttcatgctcattgccatcttttgttacaatttttactttaaaattctgcaaaacacaggaaacatttaatggatccaggcgtatttctgacacatattgcgtaagttcaagcggtatgttcaattttaccttttgccccatgatataatttgtaattgctttgtcctccagataatttgatccatcatttaagaacacctgcaagaataaattttcttccggaagcagttttttcacatcatatacttcttttttatacgcaataatacttgcattgtatccgtcttttccaccatatacatattgattaaacgactcattcatattttcaaatatggtgatctcttcttccgtaatatcaaagcactcgtaaatttcatttatcgttatgatgtccttcattgcactgccatttctggtataaaaagcagacactgcacgatatataacaaattttattggaattggaaacggaagtacccattcatagtcaataattttgtaatcactgtttgtctggtctttcatgatattgtcaaaactcatatctatattcatttcttttccacattccatctcatctggaaaggaaacctcaccaaatacctgcacaaattgtgcctctggtatgaatatatgtttctctatatcaacattccttcttatgacttcatcatacattctaagcaatgaaagaaatctcacttcatctttatctgcaagggcatcgagcattgtgttacaaagactttttcctgtcagaaattcaaaagcaacttcatcttctgaaatcatttctgccggacacaggataccttcttttttgtttttctcgtaataatcagacatattcctgatatgtgcttctgcttctttggtcaatgctctttttataaccagtctcttgtccccgtccttcattatgtaggtttctatctgaaacggttttcttctctcttttgtaatttttgagtaaattttcttcaagatatcacctctcactattttgttacttcaacaaagaacgaattcgcaaagaaatcaaattttttttctttcagaagatttgcataaaccctgttttcgttaaaaagcatcattctcgtattatcaaaagtatccaggcctatattaagatcgtcttcttttggcagatattcatcagaaaaaatctgtactgggaacttataatctggaaacggataataaaattctgtttttctgtatcctgcatccaaaattatttttttcaatgcatctttgctaaaggttctcaccttactgtctgtatcaatataaccttccagtccatcaaaaaattttccagtatgatcttctctggaacctgcccaatattttagtccaaatttgttttcaatcgcaataagcagttttccatcttctttcaaatatccgctgattttttctaaaaaggcctcaaatggctgttccgcatcggtgtagtaaccagcgtattctaatactccgatcaatgtaatataatcatatttttctttcaaaacgacatcattaaaatttccaaccataattgtaaggttatcgtattctttgttacgatttgcattaattaatgatctgcgttttgaaagatctacacttgtcacatgctttgtatttctgcaaagcactccactgatagctccacatccagctccgatttccagtacagctgcatcttttttaaatggataccactccaagatattttgtctgaccggtgaaaaatgatacaaaactggccagcgatcatcctttgccaatattttctctacatctggttcttccataataagctgtaacagttcaccctcaatgtcaccatcactatattgatcttgtccattataaaatgtataatctaatgttacttttccaatctgctctatcatagaacctcttttctatagttatctgcaactattgttttttacccgagaattttcctgatatcctcaataaaatcaaatacatgctcattttttacatataatggatttgctgtcacatgttttacctgtggcgtataagccttacagatatcagtcaaatgcacagctatgttcattggactgatattatccagcgacaccatgttttcattaaaatctttaagatccttattggcataagtattcgtaattgtctttacatcaaacacagacatttcaagtggcggataacttggatgcggcgagcacatcagagaaattcctgcataactttcctttaaagtctgcgcatattcttcaattgtaagttttccaacagaaaccagctcttttccatttccgagtggtactgagcgatgcatttctcccgcagaaagaatctcccactctccaatatcaggctgcatcataacccacttcttcaatgctgctactacaagattgaatgcattacgttccgtacctgggcgaccatacacaagaatctgtttctttttttcaacctcatctggcattttctccaaagcttttcttaatccatcatttaatacaggatcaaaagcaaagctatgagcaaagtggtaatgattttcatcaaagaattcttttaataacatgctgttaaagattgcaatcgttggataatcactcttgtaggtagaatctgcaagcagatacttcgtagaccaggagtaaaatcccggttcataatcctgaataaaatagagaaaaatattaggtttaattccaaatgtattctcaaaaccaacatatgcatcctgacagcaatatgctgtccaccagccagtaaataagaaatagtcattttctgatactggaatactgcggttaaaacggttgctatacggaataatctgttttgcagccatagaatcttcctctgcttttacaaacgtatactcatccgaatattttttaatggctgccttgtctggctctgcatccactaaaataatacgtgcatcatagcctaatgccttcactaaagtatcgaaaaacttcagtgcagttgatattccaccaaaaacatgctctgcattgatagacggaaccagaaggttcattctgcggtttggataatctatcttacggaaagtatatggtgtaatttcatatacattggtatccaattgtggtaatcctgtctctctttttctcttcagaagcattttctcctcctgctctttcactgtctgctgcactgccgaacaaattttaggctgacagcaataataatcaaggtttctattataataaggatctccatttttccgataagtcttatacatctgatctgatagatcaaaatcaatctgtggaattttgcttgcatccctgctcttagactcataatgatataaccttacatttgggtcataaatattcacaagtccatttttatttgcgcgaagtgccaactcaatatcacttccgcacacaataaagttctcatcaaatccaccgattttttcgattgtcttttttgaaaccgcaagacaagctcccgtcactgcactgacatttcttgtaaccataggtgaaacatatggtgaaccataatgctgtggtttcattcccttgaacacatggtcagcccagcctcccattccaatgactactcctgcatgctgaattgtattatcttcatataaaagcaatccaccaacaaccccaacatcgtttcgaatggctttctctgccaatctcgtaagccattctggctcaatcacttcaacatcattatttaaacatacataaacatctccaattgcaaacttcattccgtaattgttaagctttgaccagttaaactcaaatgcagcctctttcacaaggatattattatgctctgcttccacctgcttcagataagcaaaagtttctttcttttcggaattgttgtttaaaataataatctcaaaatttttataagttgtttttgcataaatactgtcgattgcagcctttaacaaatcagcgtgatctttaatcggaataataatagaaaccttaggttcctcatccatgtggtatctcacatcatagacaaacagattttctgtctcatttgcggtagctgctcctttgccataaacacgatctaaatgctcctgaatcgcattaagtcctgctgtctgcgcgtatggctttgactccgggttagctgctgtggagcttggaagatcacgccaatgataaaggatctccgagatatgtccaattttatctgtcatctctgtcatccgaagtagcaggtcgtaatcctggcttccattgaactcactgcgaaatccccccactttatcaaacaaagacttcttgaaaccgatcaaatgtcctagatacatctgactcaggaaaagatccggcgaccagtcaggtttacataacggatctcttgtatttccttttgcgtcgataatatccatgtcgctatatatgatctcagaatcttcttttttaattttctgataaaattcatgtaatgcagacggtgctagctcatcatcattatccataagaaggatataatctccggctgcaagtgctgccgcttcgttggttgctcctgaaatcccctgatttttttctaatagtttaattttaatccggctgttattcattgcagataaatgttctcttacttcctgctttgtggagcagtcatctgcaatgcaaatttcccaatttttataattttgattttctatagattcaattgccttatcaagccacttaatttccacattatatactggcattacaattgaaaaaagaatatctccactataattttttaatttttcttttttcactcttccatatccaggctcataattcacactggcagataaacgctgtttaaaaatctcaggtccctgattttttaaaaccttcaatcctttttttattttctgaggattttttaccccctcttttataattgctgcaagcttctgcgttcttcccataatgctccttttttcagcgtttcctatcaacgctgattttacttgttattagcttttctataacctactcttcactacaacttactatagagttcaaatcaaaataaccaactgtcacttttttcgataacacttgaatacaacagatatcatataatctatgatgaacttctaattcatccccattgtatcctgtacagccaagctgcaatagatactgtcctttttgaagtggcagcttctgtcgaaacgacactgtcaatgttgttcccgcttcaatcattcccggttctaatccctcaatcagagaattagtacctgtaagatctgttccttttagatctctgatcgtaaatgcaaaaatcggatttaatatatcttcataaaaatgaacttttacttttaaagtgcattcttcaaatttcgaaactgtattggtgatcttatcttcggcatcaaaaattccaaaatctataatttctgcctttttatcaccatattcctgcttatcaggattcaagatcatagactctttccacgccttgccgcctacagcgacatgtccttcttcctttttgacctcttcttccattttagattcagccattacttttttgtacatgtcgatcatgtctttcggttttccctctgccagttttacccctttattcaaaaggacaactctgtcacagtattttccgatactcccaagatcgtggcttacaaaaaggatcgtctttcccatttttttgaattcttcaaatttatgataacattttgtctgaaagaaaacatctcctacagataaagcttcatcaacgattaatatttccggttcaatatttattgccactgcaaatgcaagacgcacaaacataccactggaatatgtcttcactggctgatttacaaaatcacctatatctgcaaaatccaaaatatcctgcagcttttcgtcaatttcctctcttgaaaaccctatcattgttccgttcagataaatgttttctatcccggtatactccatattaaagccagctccaagctccaatagtgctgaaatcctgccgtttaccttcacttcgccatcggtcgggttcaggacacccgtaataatcttcaatattgtagattttccagaaccattagtacctataatgccgacagtctcaccctgttttacctgaaaggatacatcatttaatgcataatgattctttcccaaaggttttctggacaatcctaatgcatcctttaaacgatcacgatttctatcataaagtttatatactttctttacatgctctactgagattgctgcattctccatgttaatgcctttctttccgatgtgctttgtctcatttataacacatcagcaaaatgtggttttaattttttaaaaatccacgtaccaatgataaatataataatagtaaatacccaataatacactgtcattcccggattttcccagaagccaatcttgttgatcaacgagtcacgataacctgcaacaatataatacattggattcaacttaagtatcataattaaaatcgaattcaattccataccatctatattccacataattggggtcatccaaactcccacctgtaatatgattgctataatttgtcctaaatctttaaaaaagacaaccatagccgatgttgcataaataagtccaagcaataatgccatcattgcaaacgtataataaaacatctgcaatgtatacagatcaggatagtagccataacatgcatataaaacaacagtaaacgcaataaagaacaaatgcacaaacaacgctgaaatcatcttgataattggcaaaatatctatttgaaaaaccaccttttttaccagataactatactccagcagtgcatttgttcctccactcaacacctcttgaaagaaaaaccatggaaccagacctgctatcagccataagacaaacggagctgtaatcccagatctcaggttaattccacttgcatgcattcccttttcaaaaacaaaccaatacaccaatactgtcacaattggctgaacaaatgcccatattattccgagatatgaacctgcaaatttcgttttaaaatcattcttcgatagattccagattaatttgcgattttttatgatttctcctggcatactgatttgtttctgtgctgctgacattttattttccttttcttttttatattctcagaacagcattgctgttctgtctttcttgttcatctgaagacgtatattatttacgttctgcaacatatgcagaaatacccttccaaaccttatctttctctgataatgtcagatcttcttcagtcattccttccggcattggccattccacaccaatctccgggtctttccacaacagtccgccctcatcatttggatgataaaaatctgttaccttataacagaattctgcataatcggacaatacgataaatccatgggcaaatccctttggaataaagaactgtttcttattctctgcagatagcgtcacaccaaaccatttgccaaatgtctctgaaccctctcgtaaatcgactgcaacgtcaaacacctctccgtttaccacacgcaccagcttgtcctgtggataattaatctgaaaatgtaatcctcttaatacgccttttttggatgcagactgattatcctgtacaaattcacagtcaattcctgcctctttgaaatcattgtaattataagtctccatgaaatatccacgggcatccccaaatacggccggctcaatcacttttaatcctgcaattccattgcaattgtctgttacttttatttttcccattttttatacttccttttcgaatcttttttatccatagatgaaaataaagactttataatccctctgcaatttccatcagatattttccataatctgtcttcaataatggctgtgcaagtttcacaagctgctctttgtcaatgaacccccgcttgtaagcaatttcctcgatacaggagatatataatccctgacgtttctggaatgctgacacgaaatctgccgctgcaagaagcatgtcatgatttccggtgtctaaccaggcaaatcctcttcccaatgtttcaacatttaaagttccacggttcagatattcattatttacgcttgtgatctctatctcaccccttgcggatggttttacattctttgcaatctcgactacatcattgtcatagaaatagagtcccggtactgcatagtttgacttcggattttccggtttttcctcgatggacaatgcttttccattctcatcaaattctacaaccccatattctctcgggtctcttacataatagccaaaaatggttgcaccggcttcattttctgtacgctcagctgcgctccgaagaacttttgagaaactctgtccgtaaaaaatattgtctcctaataccaatgccactgcatcttttccgataaatttttcgccgataataaatgcatcagcaagtcctcttggctgttcctgtaccgcatactcaaatctcattccaagctgtgatccatcccctaataactcctcaaacaccggcagatcccttggtgtagaaataatcagtacttctctgattccagcaagcattaaagttgataaaggatagtaaatcattggtttatcataaaccggcatgatctgctttgaaattgcttttgtcaatgggtataaacgtgttccggatcctccggctaaaataattcctttcatttttcatcctcctgaaaaaaatgcattttatcactttttagtaaaacgcaaacaagcagtatcatccgacctacggacggtactgctatttgtgccattattattttccctgatacatatcttcataatatttctgataatcaccactggtaacgttgttcatccagtcttcatgttctaaataccaggcgatggtcttcttaattccatctttgaacattgtttcaggttcccagccaatctctgctttgatcttatccggtgcaattgcatatctgcgatcatgtcccttacgatcttccacatatgtgatcaaatccttgctgacatttgcttttctaggatcactgtctggaagaatctcctgtaatgtttcaatgataatattgatgatctcaatattacgtttttcattatgtccaccgatattataggactcgccaagttttccctgctcctgtaccatatcgattccctttgcatgatcatctacatataaccagtcacggatattcattccatctccgtacaccggtaatttctttccgtgcaaagcattgttgataattaatggaatcaacttctccgggaactgataaggtccataattattagacgtatttgtaatatttgctgggaaatgataggtatcaatataagcttttaccagcatatccgaagaagccttgcttgcggaatatggactgtgtggctggtatggggttgtctcataaaagtaactcttgccatcatccggaagtgagccatacacttcatctgttgatacatgaaggaatttctttccctctttaaagcttccatccgggagttcccatgctgctttcgcgcagttcaacataactgctgtaccaagaacatttgtcttcacaaatacttccgggttcttaatacttctgtctacgtggctttctgctgcgaaatgaactacacggtcgatatcattctcttcaaagattttcataatagcatctttgtctgtaatatcagcctttacaaatgtataattatcccgattctcaatatccttcaaattctccagatttcctgcatatgtcaatgcatctacattgataattctgatttcattatcatatttgcgaaacatataatgaatgtagttcgatccaataaatccagctcctccagttaccaaataagttctcattccgagatcctcctatcatcacaattatttgtcattttaccatattttatatactaagacaagttttacacatcttaggattttattaactatttcagctctgccatataaacatccaatgcgtctttccagtcagccatctgataaccatccgctaatctcatcatataattatccagaatggaatatgccggtcggtcagccgctgccggattcatctgtttatactgtttacttgttacatgatttacctttgtgctttttcctgctcttttgaaaatttcctctgtaaagtctgcccagtttgtatctccctcgcaagtagcatgatacagaccataattttccgttccctcaaaatgatggattgcctttgcaagctctactgcacttgttggcgatccaagctgatcgcagacaacactcacttcatcatgagtctccgaaaggttcaacatagtttttacaaagttttttccatctccatataaccaggctgtgcgaaaaataaagaaatggtttgaaaactgttgaacaaacttctccccctcgagctttgttttaccataagcactcaccggattcggtgcatcaaattcagtatatggttttgtaccatttccctcaaaaacataatcagttgaaacatgaatcatttttgcacctactgcctctgctgcaatacttaagtttcttgggcctaatgcattaatacgatatgcagcatcccactgctgctcacaggcatctacattggtgtgtgcagcacaattaataatcacatccggtttttcctcacgtacaagtgataaaacttcatcaattttagtaatatcaagggcagttacaccttccccttccactacgtctgtattgataaatgtcacatcacttcctgcgtattctttattgattgcacgtcccagctgtccattacatcctgtcactaatatttttttactcattctctcgtttccctctttcttttttaattctctatttttttacacttttttgttctatttttaatcaccgcaaatgttatcactaaaaataccacaaacaccactgcaaatgagagtgtacaacttaatgctgcccctaatatctccagattttttactagatacggtcccaaaaacactgctgatataagtcctgctccatatcccaacaacaaataaatctgttttccagtaaccgttaccacataataaaggcaataaacataagcgtttaatcccccacatatcataacaactatcagttccatgcgataagaactcaaatcaactccatacaaaatcgacaaaacaggtattcccaaaagatatgctcctatacatgcagcaatggttaaaccgcctatcagtatcatcattttcttcacaatatctgaaaattcctttaggtgttcttcttcccaatctttcgccagatcggtcagaagcgggcgaaacacaaaaaggcttaataaattaattacaaaagccggcataaataaaatattgtagctattttgaaccgtctgatcataataattattaatcgaatatttcggtgcattgttcaaataattcatgataaaagatgatacaaacaatggccagcaggcattataaatacctaagattcctttccactccaagtggactggtgctggttcaaagtactttttcatatgtaaatcatataataacataatgaccagcgatgttaatgtcagcgccatacctgcatataacagattatctgtcagccataacactaatgtaaatgtaatggtcgctaaaccacttcgcatcaacatctcttttcccgaaatatcaatccgttccctctgttgaaacaatccactatatacatctgctacagcttccaccattcgatacgcaagaatccagaacactgccagtgcgtctatcccagtgtatccgtttactgcgatatatccaagcatacagacaaacatcacgctacagttaagcattctactggtaaaatattggttaaaagaaaatctattctttatatctgttgactgaacgggtctgatttcaaatcctccaacagagaacaataattgtgccgttgaatatgcaagggcaaaaaatcctcccctgctctctccactaatacgattcactataataagtaaaagcatggatgacaatgaattacacagactccccgccatattccacataaatttcttttttgctgttgtttctctcatctattgctgatcctttttttccttatcatctattgcaattttttgaaccagttccttcactttgttatcaagttttgaaatatccattgtaagctgaaaacattttacaagcaatatgaaaataatcagtaaaaatataaagtttgtcgttgaatatactccaacgagctgtgctaaccaatccgcaatttgcgggaaaatgctaaataacacaagcatcattgcaaataacgtccagaaaatagaatattctatttgtaatttttcctgttttacttttttacacatatagagcaatgtaaaaatcgatacaataattaatgtaattcgaaatgcaattgacattttttctcctttatcggctactttgtaaaatccacttttttcttattgcggaaattctgtattaacagtatagaaatcaacattcttgccatatattttgctgcattaactgcattgagataactttgccccgcaattcgctcatccatctttgcctgtatttcagctacttttgcccccattttcatcaggtaagatactgtgtccggttctggtccgaaattaatgttgtttgcaagcacttctattaattttttattatacatacgcatgccagatgttggatctgtaattttgacacctgatgtaattttaattgctgccgttatcaatcggctgcctaacattctggcagttgccggttttttttcatcaacaaatctggaagcaatcacaatatcatttccttcttcaattttctcgatcattgcttctatatattccggtctatgctgtccgtctgcatcaaactggactgcgcaatcatatccattctgatatgcgtatttcattcctgtctgaaaaccacctgcaagtccaaggttcactggtaaatctataatattgtaatgattttcatgacatatctgggatgttttatctttggatccatcattaattaccacataatcatactgagaataatcttttatcaggtgatttaccaccctttctatattctcctgctcattgtatgccggaatgataattaatactttcattctttctctccattcattttttctgcaatctgcattaccttttttgcagtagcgttccatgtaaaatattgaactaaccgttcataacttttttcttctgcccttaatctgtaagtatcattttctaatactttttccaaattctcctgaatcaattcagttgtattatccttcatgataattccatattcttcattgataagcagttctcttgcaccaccctgataagttgttatcacgaaacatttgcatgccacagcctctaatacagaggttggaaacccttccgaatctgacggcaggcaaaaaatatctgatgcatccaaaagctttacaatatgttcaaaatcaatctgtcctgtcataattgtatatgaatcagatattttctgtatttcctgatataacggtccatcacctgcaatcaccagatagaccggtaattgtttgttctctatccgattcagattaattgcttttactgcagatacaagctgcctgattcccttttccggaatcagtctccctgtaaaagaaattacccttgattcttctggaatcatatatttttttcgataatctatctgtgactcccctaatatcttctgaaattcttctatctctactgcattatacagtgtgccttttgattttatgtgaaagtgtccactccactcgcagcatgcttctgacactccataataatttttgcagtattttttcaataaaaacgtaaggaaatgttcataccatccccctactgtatcaaataatttattatttacactcaaatgtgatgttccatgttctattacaatagctggaatccccctgctttttgcaaattttgcaccgtataatgaatgcaaataaaatctggtattgataattacaaaatcatattgttgttccctcagcagtttttcaatccgcttgaattcctgattttttttgaacaccggatatcttccatgaagcaaatcataacatggaaggcgataaatctgtatgttatcctgtacctcatcttctgaaaggcttcctatattagatgttacaattgtaaccttatttcctgcttctatcaattttctgctcaaatacaatgtataacgttctacgccaccaacatgtgggtaatattgtgcagaaaatatgcaatatcgttttgacattctttcacctaattttaatctgctgtattttttatgaataatatgttttcttaatatatagcataagaattttggatgtcaattcaaatcccaaaatccgataaaccaaatgaaccaaatgcacagccggattcatatcataagataataaataatcatattttttcattaatttccgatctttttttatctgttcattctgctcaatcagatatgcctgtcccatccagactgcatacggataagctaaatatgaataaaaaaccctgcgatatttttcatccatatgctgctgcgcatattcagtgtattctatcaaaatatttttcaggtcatttaccatatgatacttcattttctggctggtctgagcagtttcatgcccctttcgatacatataaaatggtttatcataccattcaaatctttctgcgtaaattaacattctcgctatccagtctgtatcctcattgcggattccttttttaaaataaagatcatgctccctgattaaagatgtctttaccagcttcgtccaaactgtaactgtaagcattcccgatttgatcagatttccaactgcatcttctctcttctttccagaggccagtcttctgtcaaatgaagacggatttactgttttctctttgtcctgccagtataccatgttggtgtgcataacaacatctggttgagtttcatctataattttcacaatatcgttcagcgcctctggattgctccaataatcatcattatccataaatgtaatataatcaccgctagctttttccaatccaacatttcttgcgtcagatgttccaccattttgcttatgaattgtgattattctactatcttttgtggcatattcatcgcatatcttcgggctatcatctgttgatccatcatctactaataaaatttctaaattgtgataggtttgtgctaatatgctttcgacacattgttttaaatataaagttgaattatatactggtataataatacttattttcatttctcactcaatatctttttcttttcatttttccagaaagctgttcccttactctcccagtccgctctcaatcgcttccacgatcgcctttaaggcttcttcctcatcttcgccctcgcacataagttcaatctcatctccagacttgatgcaagcaccaagcacgctcaaaacactttttgcatttgcaatgttatcgcgatagcggaatgtgatatgtgatctaaactgcatcgcatccttgcataagattcccgcaggtctgagatgaagtcctgttggattttttattactactttctgacttaccatgttgcattaccctccaaattctagtcccctgatttttgttgtatgctggttttaagataccccatctattattttgcagctattcagcatgattcacaaatttataaaatcaccctgactctgaatagtttataacatgatccgtgtgatcagttctgccagcttttgtgcttcctcatcgatcactttctggtctttgccctcgatcatgacacgtaccagtggttctgttccggacggacggatgagcactcttccttcgcccttgaatttcttttccacttctgccactgcatctgcgatttcctgatattccatgaacttttcttttttatggtttggaacttttgcattgacaagtgcctgtggcagtacttccataatctctgcaagttctgataatggttttcctgtattgaccattacctctaataaatgcagggcgcttaataatccgtcacctgttgtattatcatccaggaaaataacgtgaccggactgttcgccaccgatgttgtagccgttctttctcatgttctcaagtacataacggtcaccaacttttgttttctctacatggattccctctttctgacccattaatgtgaatccaaggtttgtcataactgtgacaacgatcgtgtcttttttcaatgttcccttggatttcatgtagttaccgcagattgccatgatctggtcaccgtctaccagatttcctttttcatctactgcaagcatacggtctgcgtcaccgtcaaaagcaagaccgactgccgctttttcataaacaacgcgggctttcagttcatccatatgtgtagaaccgcagttggaattgatgttggttccgtccggatttgtatggattgccacaagttctgcgccaagatctgtcagtgctttgactgatgtataatgggaagctccctctgcacagtccacaacaattttcattcctttaagctctaccggaacacatttttccatgaattttacatattcatctcttaaatcaaaacgatattcaattttgccgacgccggaaccgattggaagtacaacatctttcatattgtttttgatcagtgcttcaatctcatcctcaagctcatccgggagtttatagccctctccgttgaaaaatttgattccgttgaattccattggattatgggaagccgagatcactactccggcatctactttgtgttttctggtgagatatgcaattgctggtgtcggcatcaccccaacgaagattgcattcgcaccaacggaacagataccagccattaatgcgctcgctaacattcctcctgaaattctcgtatcacatcctactataatggttgcctgatgctcctgttcctttgtaagcacataggctcctgcctgacctaactttgttgccagttcaattgtcagttccgagcccgccacaccacggacgccatctgttccaaacattcttgccatattactgttcctctctttgttccatcccgatttttttagggattgttcttttctattccattcattcgttggttatctcgatttcaagaccgattttccttccagcatccgcattttttcctaccgctcacttactttctttgcagtcgatgtgttttccaattcactgtctgcgctgtcactgtctgcggaagcggatgaatccgtcgcattttcaatcgtaacagccgcataagtatctgcataagcaacgttattactgtcaagttcaaatgtgatcagcacattatgtgcgccaagttttaaatcggtcagatctatggttccggtaatcgtcttttcatcaagtgcatcgatcacacttgctcttccacttaccgtcagagtaatattgtcttcctcatactgcactttctcatccgagtcaagaccaattacctgaaggtttgtaaccgggatctgcaatgtcttggtcttcactgcttccaccacgactgtaacatcaattttcgaatccgaactgatcactaatgaagtacctgacggtagataagtggaaatatccactgttttttcaatgtcagaagctgcatcggtaagatctaacacttcttccggaattgtgatcttattgatcgtatttaatacagcagcctcacccttgatacgcactgtctgtggcgtataggtaatgtctcccttctggtatccctctgccggagttccggtcgttaagaattccagttccacatcttttgtatttaaaatctgtgcactgatgttgaccgtgttcacacttaacgtaagctttgtcgtgtcaaccacttctccctgtgcgtcatagaaaacaggggtaacacggtctgtgatgtctgttgacatgccatccacgttgatcgttgccacaactgtatcgatctggtttacaacagaagccggaccggatactttcataacgttcgcatccgtgatctccacatcgcccaatgcacatccggatgtgaccgtacctgttgtatttgccttgattgggaactgcttggatgcagaatcctctaattcaagatccagataaagatctttgcttgtgatcgtaatgttgctgctgtttcggttgcaggttacagtaaccggcacacggtaagtacctgtctcctcgtcaaattcaatcttctgtgcatctgccgtcgcagtaaagtttgcattggtaagactgttatgcacagaacgttttgcatacacactgaatgtgattgtattctttccgtcaagataatccgcccattttcccatggatgtaatgtaggatttattttccagagaaacactggtggtataaggttttgagttgctcggatcatcaatgttgatcaccacgatccacaaaacaactgcaaaaagaaccgccagaaccttaaggccaaagttattcattactttctttccgaatctttgtaacatctttcagcctccttctccatgattttgctttcgaagtgtcctgctcgcgcttctgaatgtaagacagcttattcttcaaaaattctgcatctacattccgatagagttcaccgtctagtgcaatcgaaacttttcctgtttcctctgaaactacaattgtaagtgaatcactcacctcgctgattccgaccgccgcgcgatgtctcgttccaagatctttgctcaggcttaacgaatccgtcagcggaagataacacgttgctgaaaccacgcggtcaccacgcacaatgactgctccgtcatgcaacggcgtatttttttcaaaaatgttgatcaaaagctggctggtcagaataccgtcgacagcgattcctgtccgctcgtactcggtcagcacgatctcatcctctacaacgatcagcgcacctgtctttacttttcccatttcatagcacgcttttacaagctctgtgatcgtcttgtctgaaaatttgccattctcaactttaccgaaatcaaaattaaatagatttgcaaaaatattctttcgtccgagattttccagggcttttcgcatttccggctgaaaaatcacaaccaccgcgatcattgccacattaaacagtttatcggcgatccagacgatcgtattcatttcaaataaaactgcaagcaaaacaaaggcaaggatcacaaggattccgcggagaagcatccatgccctcgtatccttgatccaaaccagcatatagtagatcagaaccgaaatgataatgatctcaataatatctgtataggaaacctgaagtgtcagataagacaccgctttttcccaaaatgcctgcaatgttacgcctaaattctgcaccgccttcacttccttttaatctaataaattctcgtctatgtccatttcttctgcaaatttctttttattcagacgttccttctctgtttttccgttaaaacgtttgatctgtttatctttttctgtcactaaggactttggaacggcttttacataataataatagtcgtcatcctcaaactgcaggcgttctgttctcgaataatccagattaaagaacaaaaactgaatgataaatgcgatcacaccggagatcacgcttccaacgatcaccccaacaatcttatccgaaaatccaagtaaaatataacctgctgtcaaaccgatcgcttcaaacaaaataccggatgcccatgcaaccgtccaggaatgttcaatatcaagttttctgacgatataaacaatcaatgtcgtgataatgaaaatcgcaagaacaaggtacatctctttatttccaacaagctggtttaatgcaactacaactttagatgcagtggaatccgtttcttctgcggtatcgctcaaagcgctcgcattctcgctcacgccgtggataaagaaatagatcactgtaccacaggcaaccgaaacaacggaatacgcctcactgagcagtccggaaccaaccggcactgcatatgggatgtgcagtttaaagcagatcggtgtcagtatcgcattgatcccgctctttggtgaaaagcggaaatagataaaatagatgattgcaaacatgagaagtcctaccagacatacctcaatggataatgcatacagatccagtaaaacaaccagtgctgcaatcacgatcagtccgtttaccggaagcatggaacacacaagcgcaaggatcactgctaccggtgctttgctgaccattttcatatagccgatgctgctgttgatcattaaaaatgtaaacaatgccaccacgaaccggatcactggtgttacatatatctcatttttcccgtaaaaacggatcagtttttcttttaattctaataaggttgtcattttagtctcctattcccagtctttgttgtcagacattttcagcttgtcttctctctcgtatatctggttcagcttcttcagattaccgtaatacttcttgacttcacgccgtccctttgtatatcttctattataaacaaaataggtgatcgccatgtaaaccagcataaacacgatgtacccgatcaatacggacgtgagcattccctgaatatccattgcattcagattctccatgagctcattcatggaataaatcccccaggttaccaggatcaggacaaatccgatcgttcctgacacaaagcttccgagcatccgcagggaaatataatcttttcttgcatactgcgtcatcggcttgcactcttttccctcgtcggtatcaaagatagccatttttatcatatgatgtaaacgttcttcgttaaccatgcaaatttccttcctgtatggcgtgaaaacatgttttctcctgacagccggcatatcaggtcaccgctttgcttctccaaaaaaacacattctgcacgcaattatgcattcttattcatcattataacacagaaggctctattttcaaagaaaaaaaagcagacgcccacttctgcgctattctatatagaaataacgcagttctgtgccctgctttttcatttaaatatgatatcaatttctaaaatacggatttgctccacgtgcagaaacaattctgcacgctgtcttctagcgaagaaatctcatcttatcccctgcatcacgctctctgctaggtttctgccgcatcgggttcggtttatccaatgcactctgaagattatttgccattgcagctttacacttgtcacagtaacgtccgcttgtgatcggtctgccacaatgctcgcagactacaccgtccagtgaagcctcggacaggatcagtctttcttctctcacccactgcttgatctgttttaccgaaacatccatgtcctctgccacctgactgatagatgcctgtggatgttcgtcaatatagtccttcactgcttcaaacttcttctccaatgccgctttacattccgggcaaagcggtgctccgcccatgtagttaaacaatcttccgcagcctttacaatttcttacatccatcgtatattcctcctaaaatccttctcctatactgatacagaggaaatagatctcttccacccctgcctgcaaaagtacttctgccaccgcatctatcgtgcttcccgtcgtatagatatcatctacaattaatattttcttatattttactatatctggcaccaactggaaagctttttttaaatttgccttccgttcgacatcatttaattccttctgcggagtcgtattccggattctttttaccatgcgtttttcgactgggagctgcatcctttcgcccagcgccatggcaaacaccaccgcctgattgtatcctctgcctttttccttacagcggtacatcggaaccgggataatcgcttcaatctgttttcttctgatccagccgccatatatacgtgcggcttcttttgcataatatgcggcatattccctcttattactatatttaaaacggtacatggactgacggatttctccctgatatacaaaaaccgctttcccctgggaaaaatagtgctgtttccgcgcacagtccgaacaatactccctcctctggttttccaatggtttcccgcactttttgcagaccggttccccaatacagaccacctttttgcggcagtcatcacaggtatcttttccaacatgtatcacctcatcacagacagggcatctgggtgggaacacaatgctggctaacgcctcttttattttcataaattcctttctaaaaatctctccagttacaatcctagcactttttccctttccatactataaaggttttcttaagattttttatattaacagttgacgaatgctttatttgtgattataattcaatcattaaaagcattaatactttaaagtgttaaagaaattattttcaaataaggagaatgaatatgaaaaagatgaacaaaatgctctctgtcataatggcagccgcaatggcggtttccatgacagcatgcggaagtgatgccgcttccgacaacagcaccgctgctaacgataatacaacaactgcaacagaagctggagcagccagctctgacggtcagaagtacacgatcggtattttacagcagttagagcacccggctcttgacgcggcttccgaaggatttcaggatgctttgaccgaattactcggtgccgacaacgttacattcgaccttcagaatgcacagggcgagcaggcaaactgtgctacgatcgcaaataattttgttgcaggcaactatgatctgatccttgcaaatgcgaccactgctttacagtgttccgccgctgcaacaagcacgatcccgattcttggaacttccattacagactatgcaaccgctcttgaaatcgacgactggaccggttctacaggaagaaatatttccggaacttcagaccttgctcctttagcagatcaggaagccatgatcaaggaattattcccggatgcaaaaacagttggtattctctactgctcagctgaaccaaactccaaatatcaggctacccagattgaagctgctttagatgcagacggcattgcctacaaagagtacaccgcttctgattccaacgatattacttccgttgtacagaccgctgtttccgaagttgatgtcatctacattccaactgataatacaatggcaaacaacaccgagaccattaacaatatcgcacttccggcaggtattccgatcattgccggtgaggaaggtatctgctccggatgtggtgttgcaactctttctatcagttactacgacatcggatacaccgcaggtgaaatggcttacgacattcttgtaaacggtgccgacatcacaactatggagatcaagactgcaccaaaggtaacaaaagagtacaacgctgatatttgttcccagcttggaatcacacctccagatgactatgcagcgattaaagctgaataattgcccgttactgttcgcacgtaccggggcagcagcatgttcgagtactttctagacaataacgattgcgcttaaagttttaccaatgcaataagttaaagctttaaatcaatcaaatattatgctataatatgcctgcggcttttgtttctcaaataccgcaggtattttttacaataaaaaataaggagaattttcttatgtcaatgatgttaaccacttacttagcatccctgagcccgctggcattgctccgttcgctgccaggcgcctgtgcacagggactcatatggggacttctcgcacttggagtctacataacttacaaattactggattttgccgatctgaccgttgacggctctatggcaaccggcggtgctgtcgctgttatgctgatccgcgccggaatgaatccatggcttgcccttgtttttgcatttcttgcaggaatggctgccggatttatcaccggaatgctgcacactgcacttggaatcccgggaatccttgcaagtatcctgacacagattgcactttactcaatcaacttaaatatcctcggaagttccaaccaggcagtcagcgttgacaaatacagtctcgttgtttccctccgttatatttccgattccactgcaaccaagatccgcatgtttgcaacctgtgttctgttctgcgttgtgatcgttgcgattctttactggtacttcggaaccgagcagggacatgcgatccgtgcaaccggctgtaaccagcaaatggcaagagcgcagggtatcaataccgattttcacacggttcttgcattgatgatctccaatggtcttgttggcctctctggaggactttacgcacagtatcagggagccgcagatgtcaatatgggacgtggtgctatcgttatcggacttgctgctgtcattatcggtgatgttctttttggaaaaatctgtgccggcaaaaagattgcatttgcctacacactgctctccgttatcgccggagctattctgtactaccttgttttaagcgttgtcttatggctgaaattcccgtccgacgacttgaagttattctctgcaattgtagtagctatcttcctttcaattccgtatctgaaagcgaaatatagcaagaaaggagtggcaaaataatggctgaaatgttaaagatcaatcacatctgcaaaacttttaacgcaggtacgatcaatgaaaaagttgctttaaacggcgtagacctcactttggaagacggagattttgtcacggtgatcggtggtaacggtgctggaaaatccaccaccttaaatgcagttgccggtgtctggccggtagattccggaaagatttatatcggtggggatgatgtcacgaagctgtctgaatataaacgcgcaaaatatctcggtcgtgtttttcaggaccctatgaccggaactgccaccacgatgtctattgaagaaaatatggcaatcgcagcccgccgtggcaaaaaacgtggattaagctggggaatcacaaagacagaacgtgatacttaccgtgagatgttaaaaactttagatttaggtcttgaagaccgtcttaccagcaaagtaggactgctctccggtggtcagcgtcaggctatcacactgcttatggcttctatccagaaaccaaagcttttactgttagatgagcacaccgccgccctcgatccaaaaacagcagccaaagtacttgagatttctgacaagatcatctcagacaatcatctgactgccatgatggtcacacacaatatgaaagacgccattgcacacggaaaccgtctgatcatgatgcatgagggaaaagtgatccttaatatttccggcgaggaaaagaaaaagctgacagtggaagatctgcttcaccagtttgaaaaagtcagtgggcaggagtttgcaaacgacaaagcgttactgtcttaaccagatagtgcaggcagattttgtggctatatcataggtagtgaatggcagatatagaagatccgtccacaagtcaaattattagtgtatataaaagaaaatcgtacaaacgaaatatgatgttcctgttcgcaaagctcacaaaggaaatcatatttgtttgtacgattttctttttatttacgcagtgaatgacttgtgcatgagccctgatatctgccctgctttatgttatgaatgcagccacaaaatctgccccatttacgtttttggctctcagcctcataaaacggagtccataactgatattggctacctacattatccagttaatctccggtttacttaaacagatttttgaagaactccccaatcgcactgaagatgtttccaaagaaggttccaatggatgcaatgattccagaggaacttcctccatttttaaaggaattgtaaagagaagctgcataatccacaagtccgctaagatcaattcctaacgatgtgattttcaaaagcagatcaacgattttctgtctctcatcatccgacaatgttacgccgtatttgtcacaggcttcatcaattgcctcattgatgctcttttcatctgtcaatcctttttctgcgatcagagacttaatgtaagcaatgaattcctccacttcctgatctgtcaatccctgaatggatgcttccagttctccggtaacaacaagttcgtttaaagctgcatcaacaacattatcctgtaccgtttctcctgtcattgcctcatatgcctcaaagattccgaccagtgctgcggttcctgagattggttttggaccggcaacaataatatctgcatctgtgattcctgctgttgtcagtgcatttttatacataccaacggtacagtatgtgatgttgtttgtagaaatgttcagtccatttccttttttacgttttacgattacaaccgaagaccaggatttgcttccgattttggatgcatccacataggaatccagatactggtgctcctgtgcattggtaacataggtcacatcatagtttgccagattcgccggatcgatacccataagggataatactgtatttctctggtcatccgataaatctgcgccgagtgcaagatacggtttgtcgtccttcttgatctcaacatcatcgttattctcatccacaatgacatctcctgtcacattttctgtggattttgtatcgtcctctacggttactccaccagtcacgtttccatttgtatcactgcctgaagtactattggttgtgctttccgaactgttcgtactgttctgtgactgtgatgcagagctgcctgtatttgtgttggtctctgaactgccggtactattctgtgaagcagaactattggcatttgtgttggtctctgagctgttggtactgccctgtgaagcagaactattggcatttgtgttggtctctgcgttgctctgacctgtctgtgtatctgcgctgtttcctgctgcgctgttttcttcattactgcctgactgcattgctgcaccgcttcccgtgtcactagttccggttgctgtactgctgttttcctgtccggctgcactctgtgctgaagcatctgccgcaaatgatgttacatgtgttggtatcatcatcactgctgccaaaatgatagctgctattctttttgtcattctttttcttttcacttttttcttcctctcatccctacagtatatgcgaatccaatctgctcaacagattttataaatttgcagcctgtaatgattcttataaataaaaatctgctttgagttttcccaaaacagatttttattttactacatctcattataaagcacaagttaacataatatgtttataaaaaattaagaaaccaatatttatgtatcgattcttactctcatccacgcaagcagatctgcatacactttgtcacggtctgtctcgtttaagatctcatgtctgtcattctcatacagcttgtatgtgatatccaaagagcctgcttccttaaagagatcatacacttttttcacgcccacgccgttgtcaccgaccggatcatcttgtccggacacaatgaaaattggaagcttgtttggcacttttttcacattttccaactgattgtcgtaaagaacagcctccattaatccgagataaccgtttaatgtaaacttgaatgtgcatcttggctcattgtagtagaattttacaatgtcttcatcctttgtaagccagctgttggaaagtgtttttccggaaagatcgtatttcttatacggtcctccaaaagaaagagactccaccagtctgcttctgtgatgccagccaaaaatttttgcaagaaatctacatacattcattccgagctttgtgatattatccggtacacaaccggtacccatgatgatcgcacctcttaaattgtcgttgtgaatggtcagatatttacgcagcatataagatcccatgctgtgtcccagcataaaataaggaacgccctgattttctttctggatcatcgtgcgcagtgcatgcatatctgcgatcaccgtatcacttggattttctgcaaaatatccccagtcatctttggatgcaaccgaatctccatgacctaaatggtcatgtcccacaaccataaaaccattctgtgtcaaaaattctgcaaatggtctgtagcgttccacaaactcgatcatgccatgtgtgatctgtaaaatcgccacataagttccgtcctccggaatccatttaaccgcatgaatattcgtttttccgtctgctgataaaaatgtaaacttttcttcttttgccatatttttccctctcttactcctgaataaaacgatgtacatcctcgactctgcgttccagttcatccgtacattccttgtgctctttccattcctgcgtaagtgtttctgccatggataacactttgctctgcacctcaaaaaattcattttcactctggcagagattttctaaaatatcctcaacatctgtctcatcctgcacattttcaccggaacctgttgtttttgcatcacttccgctttccagaagttttgtcatgaaactgttattctcatgtaaaagctgttgcagtccctgaatctgttctccggcttttccagaagtttctgaaacatcatcgatctgtgcaagcgcttccgtcaccgtctctgtatactgctctgcattcatacggacttcctctgccgctgccatgaatttgctgccgtcttctcccattcgccctgcttcgattgccgctccgagtgccagcacgctcatctgctgtgatatatctgccagctttttcaaagcctctccgacaatctgctgcttttggcaggcggcttcataaaatgcctctatctcctgcatcggcgctgtcacaccctggttctgttttataacctctgcaattgcttcctgctcttttttaagtttttcccggagtatttcattctcctgctgcaaactctcattctgctctttcttctttgcaagctgctgttttaacaacaccgtctgtcctgcatttgcctccgagcactcttttaattgtgtcagctgctctgtcattgccaagattgtctcatctaactctgattttgaaattgtcacctgtaccagagtttcttctgtgttttctttttcctgtgcgatattggaaatctgctgctgcagacgattctgctgttcttttaccgcgagaagttcctcttcaagctctctcgtctttttcccaccgaacatatgccatcctcccgcttttactgataattccgaatgataacctgtacactttcaactccattatactcgttaatctccggatagtacacaatcattatccttaatttgtttatctgaccgcgaaaagccttctcaacttctgcggctccgtatttttccgtgtaatatgctttgaatgcttcgatatcaccgaaataaactgctgataccggctcgcccgaagcagtcagcagattcagccttaacacattctggttttttcctaccacaaacgcacgcgcaacacttaagttcttgtcagcaaactgcggtttattattggcttttccaaaaggttccaacacagcaaattcccggataagcctgctgtctgcgtatgccgccggcatcggaatgtcgattttgatctttgggatcaggtcatcttctgtgagatttgcacaggcattgattttttcacggaacttatccacattttcttcgggaagcgacagtcctgccgccattggatgtcctccgaatttatctaaaagctccctgcatttgcagagttcctcatacatcgaatactcctcgatagaacgcccagagcctttcacaccttcctctgccttcgtcaaaacaaacaccggcttatgatatgtctcccggatgcgtccggcaatgattcccgcaaggctctcatgaacttgtgacagataaatgacaagcactttatctgacctgtaatgttcctctgccacgcgcttcgcttcctcgacaccatctgccgtcatgtctttgcgctgctggtttaactccactaattctctggctgtttttgccgcttcttcctctccctgtaaaaaaagagacagtgacagtttcgccgtgtcaagtcttccgctcgcattgatgcatggtcctaacacaaaaccgaaatgatatgcattcacctgctccggctctaaatgattttgaaagatcagcgccctcattcccggattttttgtatggtggatgcgttttagcccctctttgacgagaatacgattttcatctgtcaaatccatgacatcgccaacggttgcaaatgcaacattttccaaaaaatcataggtttcttctacatccagccccattttttcatataaaacctgcaatactttccatgcgactgctgccccgcataactctttaaaaggataggcacattcctgctgctttggattcacgaccgcatctgcattgctgcggagaaattgtctttctccttcctcttccgtgtaaggaatctcatgatgatctgtcacaagcaccgtcattcctaaatctttggcatgtgcgatctctgaaatcgctgcaattccattgtcgcaggttaaaatggtatccattccgtccttttttgcctgatcaatcagattctcgttgataccgtagccgtctttcatgcgatccggaatctgtgtagacacgtttcctccacatctcgtaattccctgatacaaaatataggttgacataactccgtctatatcatagtcgccaatgatccggattggctttttctcttcgattttcttttttaaaatatccgtcaaaatatctgcatcttttaacaaatgcggatcatataaatcttttaagcttccattcagatatttatcaaatgccgcctcaccgattacctctcggttccggatcaggcgcgcagtgacagggctaatcccgaacttttttccaagcttctcgaaatcagctcccttatttatcacaaaccatttttccatgtaacacctgctgtttacttcttctaataatgcacttccatgagcatcagtccgcacgccggtgctgtataaccggcattttcccggtttttgctctctaaaatctgtggcatttcctccggcgatcttctgccatccccaacctcgatcaatgttccggtcaggatccgcaccatattttgcaaaaatccattgccccggtaatcaatccacagatcattgcccttcttcgtaaaattaatctcgtaaattgtgcggactgccgtttttttcattttcttgtttccgcaaaacgaagtaaaatcatgtgttccgatcagataggaagcagcttctttcatgcgctccacatcgagtgttttctcatactggtactcatatttccgttcaaagacatccgtgatctctcccatatggatgtgatagcggtaagtctttttctttgcggcataacggctgtgaaaacgctcgtccacctgctcaaccgcaataaccgcaatatcatccggaagataatggttcagataggataaaatctttccctctgtaaaatgctcttccacatgaaaatttgccacctgaccttttgcatgcacaccagcatctgttcttcccgaaccgatcacttccactgcatgccctgccatttgtcctaacacagcctctatttttccctgaatggtctggtctgtgctgttctgcccctgccagcccttatatcttgttccgtcatactggatcgtaattttaaaattgttcattctaacctccggtttacaacacactttcgcgtatacggtcacacaatccactatagcgtttctgctgtgatgtgttttttatcatctgctgaaaagtagtatcatttccaacaagtgtaacgcattttcttgcccttgtcaccgccgtatacagtaaattccggttcatcagcattgacggtccactgagcagtggaatcacgactgccgggtactcgctgccctgggatttatggatcgtaattgcataggctagttctaattcgtccagcagcttgtaggaatactctacttttcttccctcgtcaaattctactgtcatagtctcagcgaaatcattaatttctgcgataatccccatatctccgttgaaaattcccatgcctttatccacagtaagaccgaatttcgtgcagatttcccactctaactgatagttattctttgtctgcatgactttatcgccctcacggaataccatatcgccatgttctttttcccgctttgacttatccggcggattgagataatgctggaggattccgttcaaccgctctactccgagtaatccctttcgcatcggggtcagcacctgaatatcatagggtgttgcatctacaaatttgggcagtttttgctttacaagctggagtacgacattaataataatatctgcttcgtatctctttaggaaaaagaaatccatgctcttattatccagcgaaacctcttccccacgattgattttatgcgcatttacaatgatgtcactggtagatgcctgacggaaaattttggtaagcatcaccacattaaatatttcggactggataatatccttcaacacacttcccggtccgacgcttggaagctggttaatatctccaacaaggatcagtctggttcccggagcgattgctttcaacaatgaattcatcaatgttatgtcaaccattgacatctcatcaataataacaacgtccgtctccaatggatttgtctcgttacgttcaaatccggcattaccttccatgccgccattcaattccagcatccggtgaatcgtgcgcgcctcaaatcctgttgtctcactcattctttttgctgcacgtccggttggcgctgcaagaaagatatccattccttctaattcaaaataccgaataatcgtattgattgtcgttgtcttacctgtacccggtccaccagtgatgaccagcagaccattgcgcactgcctcttttaccgcctgaacctgatgttcatctaactccatacctgtctgtttctcaattttgtggatacgctgttcaatctctgcatccgccacatcataggtaatatcgagttcccgcagcatggtcgccgtgttcgcctccatgtaataaaaagaagccgcatatatctgtgtctgttcgccagactgcttcatgacaatcttccggtcaatcgaaagatccatataatttttttctataatttcttgatcgatccccagcaattcacttgcctttgatgtcagttcttcctttggcaaaaatgtatgtccctcgccggacgcttgaagaagtgtatacaatataccactacgcacacgaaaatcagaatcagtccggatgcctgcttttgcagcaatatcatctgctgtccgaaatcctaccccttcaatatcatctgcaaggcggtatggattttcttttaaaatgccatacacttcctgcccgtatttattataaattttcacggcaaggttcatggtaattccaaactgctgtaaaaaaatcatcgcctgacgcagatctcttttttcattgacctgactggcaatctccatcgctttccgctcgctgattcctttcacttccacaagccgctctggttcttcttcaatgatcctgaaagtatcttccttaaatctgcgcacaattcgtgctgccatggcaagcccgattcccttgattgcgcccgatccaagatagcgttcgattgcctcctgatcttccggtgctttttcctcaaaactaaccaccttaaattgtgttccgtaggtaggatgatccgtataatcgccagttgcttcgatattttccccttctgcaattgttgaaaaaataccaacacaggtgatctctgtctctccgcttaccagattgagcaccgtatagccattatctgtattgcgatatatgatatgttccacataccctgctaatttttccataaccttttctgattcactttctttctcaattaacactatatgcatttcctgcataatatatctatagtaacacgcagacgcctgtttataattttctttatagcaaaaaaactgccgcattaagaaataatctcttaaagcgacagcctatgcttcttaatctctgtcattcatataaaacactgtctgagttctgttatgaatcgtgtcattttatgtatcagtcaatgttgtaattgcgtttcatctgctcatacaatgactgggtaaaatttcctccaacctgatcaataatctcatctgccactttttccacggcaaaatccattgtatagtctgtcatggttgacaaggatgcatctttatcatcatcctctgggagcagattcttctttacttccttaatgatctcttctacaaaataggattcaaaatctttgcagacctgcatcagttcatcctctgatgtgtcagatgaaacctgattcagtgactttttcaatgcattggcattataattggttgttgcgtctgtatttgttgtattaagcatagccgccatgccgtcaattgacatactcatattctctatcctcgtacttcaaaatctgctattgtatacaaaaatgtaaaacttttcttatacttcgcttctgttcatctatgttctatttcactaacgtttcagattgttagcctgctctaacatatcatctgatgttgtgattgccttcgaattcaactggtatgcgcgctgtgccacgatcagattgaccatctcatctgcaacctgcacattcgatccttccagatagccctgatgaattttacttctcgtaaggtttgcgtttgtcgcctcatttaaagctgctccggaagcattcgtcactctcaaaagatttgatcctgctttttccaaaccggaaggattattaaactggaaaagtccgatcgtctggttcaggttcacataagcacctgcattgttataatatccaacctgtccagctgttgtcactaccgccttctctgaattgacattattcggaagaacaatcgtgtttccattggaatccagaaccggatatccatcggtattggtaagtgtagttccggttgttccaatactccagttaaaattaccatttctggtataataagttgttccgtctgcgcctcttacctgaaaaaatccgtttccttcaattgcaaaagcagatttgctctcatcctcaagcagtgcaccctgtgtataacttgttgtgttggacgctactcttgttccaagtcctacctgtgcaccaatcggtttttcctcaccattggcactggtggttcttgtctgaatggtttgatataacaatgatttaaattctgttttctgggatttaaatgctgttgtattgacattcgcaatgttatttgaaatattgtctacgttggtctgctgcgctctcattccggaagccgcagtataaagtgctctcatcataattgatttcctccaactgtatcttctatattattatcttcttcacactatcgtgtacacattatacttttccgacctgatttacggtcttgtccaatgtctcgtccaccgtgttgattactttctgtcctgcctgataagctcttgagattgtgatcatttttaccatttcatcgaccacgttcacattagaaccctcgatgcatccctgctgtacttttgcatcagacgctgtgatctgacctccagccacaagatcatacaggttctcaccatattttgaaatataattatagtcttcgaaatcaacgacaccgattcgtgtgacaagctgatcattctggtaaatgttacccaattcatcaatggtaaccttcgcattcggatttaaccggattcttgcattcggatccgtgttctgtgcacctgcctgattcaacacataatcgccatccttggttaccagatatccgtctgtattcaccgtgaacgcgccatcccttgtgtattttacagaagtctcgcctgctttattcgtaaatgcgattgcaaaaaaaccatttccagccaaagcaacatctgtctcattatctgtcactttgatacttccctggtcataatttgtgtatgtttcacctaaatgcacacccatgctgatcacacccagcttcttattcaaaccataactggatgtatccttgatcttaattgcaagttcatctgcaaatgtctgtgaagttgttccttcttttttgtatccatttgtatctgcatttgccaggttgttcgtgagaacatctaaccttttctgttcattcaccatacctgtgtaagctgtatataagcctttgatcatatattacacctcgtataaatcgttgtgtatccatctgttggtcacgttttacctaatatagtatttcggtcgatctgacagaaagattagcttaatcgtcgtcacgttttccagataaaaattctacatattttccagttccgatagcaacacaggtcattggatcatctgctgtcattgtgttgattccggttctgtcctcgatcagttcttccagacctcgaagcaatgcaccgccgccagtgagtacgataccacggtctgcaacgtctgctgcaagctccggtggagttttctccaatacagaatgtacagcttcaacgatctgtaaagtcggctcgcgaagtgcttcctctgtctcctcagaagaaacggtcacagtcttcggaagtcctgttaccagatttcgtccacgcacatccatagtctcattctgtgccaatgggaaacatgttccaatctttatcttaatatcctctgcggttctctctccaatcaaaagattgtgtttctttctcatgtaacggacaatggcctcatcaaaatcatcaccagcgatcttgacagacgtacttacaacagatcctccaagggaaattacggcgatatctgctgtaccaccaccgatatccacaatcatatttccacaaggtcttgcaatatcaattccagcgccgattgctgctgcaattggttcttcgataatggaaacctctctcgcacctgcctgataagttgcatcctcaaccgctttcttctcaacttctgttacaccacttggaacgcagacgctgattcttggcttgcggaatgttttcttgccaagtgctttctggatgaaatatttgatcatcttctctgttactgtataatcagaaataacaccctgacgaagtggtctgactgccacgatgttgcccggtgttctaccaagcattaatcttgcttcttcaccgattgctttgatcttatttgtatctctgtcaaatgcgacaacggaaggttcttttaatacaacccctttgcctttaatatatactaatatactcgcggtacccagatcgataccaatatctgtgctcatcataattatgatattcccctttctggaattgtttggaatttatgccaatatttccctgtaaaagttacacggaaatacatttaaaaatcacttttgtcttctgcacaataaaaataggaagtacgatactactcctatttttacatatacaatagtattatatacaaaaacttatatttttcaaagttttttttccagaaaagccgatttttcaagaaaaataagatttttttaataatttgagtttcataagattttttttattttttcatcacaaaatgaacacattttctttttatattataagagtactagctaatatgacttttttagtcggctaatataatttttcataactcatgcttcttcgatatcttcggatattggaggagcactccccgaatattctggcgtctcgaatgaggcgcctttttattatatccggatgccatatagcacccggatattttgaaaactgcaacgctctattctttatttttccagatattttttcacgtattgtccggtataggatttcttcactttcgctacttcttccggtgttccctgtgcgatcaccgtaccaccgccatctccgccttccggtcccatatcaatgatataatcagcggttttaataacatccagattgtgttcgataacaacaactgtgttgcctccgtctgaaagtctccgcagtatctcgatcaatttgtgaacatctgcaaaatgcagtcctgtcgtcggctcgtccagaatataaatggtcttgcccgtgctgcgcttgctgagttctgttgcaagtttgatacgctgtgcttcaccaccggacagttccgtagatggctgcccgagttttacataggaaagtcccacatcatataaggtctggattttacgctcaatggaaggcacattcttaaaaaactctaatgcttcctccaccgtcatatccagcacatcatagatactttttcctttatattttacttcaagcgtctctctgttataccgctttccttcgcacacttcacatggcacatagacatccggcaggaaatgcatctcgatcttaatgattccatctccggaacatgcctcgcagcgtccgcctttcacgttaaaactgaaacgaccttttttatatccttttgcttttgcatccggtgttccggcaaaaaggtcacggatcatatcaaagacacctgtgtaagttgccggattggaacgcggtgttcttccgattggagactgatcgatgtcaatgactttgtctaactgttccagtccaaggatgtcatcatgttcgcccggaatacatcttgcacggtttaaatcccttgccagatgtttatataaaatctcattcgtaagagaactctttccagagcctgaaacacctgtaatgcaggtcataactcccaacggaatatccacatcaatgttctttaaattattttcccttgcccctttaatggtaataaaaccggtcggcttcctgcgctcttttggaaccgggatcttgattcttccacttaaatatgcacctgtgacagaatccgggttctgcatgatctcttctgcagtaccgcacgcaaccacttgtccaccatgtgagccggctcctggtccgatatccacaatataatctgcggcacgcatggtgtcctcatcatgttctacaacgatcagcgtatttccaaggtctctcaaattcatcagcgcaccaagcagtttatcattatccctctgatgcaatccaatagacggttcatctaaaatataggcaactcctacgagtcccgagcctatctgggttgccagacggatacgctgtgcctctccaccggataaagtaccagttgctctcgataatgacagataatcaagtccgacctcatttaaaaatccaactctcgcccggatctctttcaaaatctggtctccgatcagatgctgctgctttgtcagttccatctgatctacaaagttcttcagattcttcactgacatggaggtcatctcataaatatttttgtccgcaaccgttactgcgagggattccggtttcagacgctgtccatggcaggcttcacacggtgtgatacgcataaactgttcatactctgctttcatcgtctcagaggaagtctcacgatatcttctctgcacattgcggatcagaccgtcaaatgcgacatcatacacgccctcaccgcgctgtcctttatagcgtactttcagttcttttccatgtgttccattgattagaacatccttaatctcatccggatattctccaaatggtgtatccagtgaaaaatgatattcttccgtcagcgcttttaaaatcgcataggtgaagctgctcttatcggtgcaggactgccagcccattacctggattgccccttccgaaatgctcagtttcttatccggaatcatcagatctatatcaaattccattttatacccaagtccaaagcaggtagggcacgcaccgaatggattgttgaaagaaaagcttctcggttccacctcatcaatgctgatgccacaatccgggcaggaaaaactttccgaaaactggattggttctccgtcaatgacatccacgatcatcagaccgtctgcaagctgcagcacattctctatcgagtctgtcagtcgtttttcaattcccggctttaccataagacgatccacaacgatctctatgttatgttttttatttttttctaatttgatttcttctgacaattcatagagattgccgtccacaacaacacggacatagccgcttcgcttcgcctgttcaaaaaacttctggtgttctcccttacgtcctctgaccaccggagccaaaagctggatcttggtgcgctccgggagttccataatctgatcgaccatctgatccacggtctgctttttaatctcttttccacatttcgggcaatgtggcacaccgattcttgcgtaaagcagtcggaaatagtcgtaaatctccgtgaccgttcccaccgttgatctcggattccggtttgtggatttctgatcgatggaaattgccggagaaagcccttcgattttttccacattcggtttttccatctgtcctaaaaactgtctcgcatacgaagacaaagactccatataccgtctctgtccctccgcataaatcgtgtcaaacgcaagagatgatttaccggaaccggaaagtccggtcaatacaacaaattcatctcttggaatatctacatctacattcttcaagttatgttcattcgcaccgcggatcttaatgtacttgcggttttctgatgtcttcatatttttcttgcctttctataaatacttgtcacttcataattacactttataaatcttcaagcatcttcttcaactgtatcatctgatcacgatattcggctgctgcctcaaaattcagatcactggctgctttcttcatcttcttctgaatgtcagcgatcagcttctctaattcttctctgttcatagactcaggatctttcttgaagttcagttcctcctgtgccactttcttggatacactgatcagatcacgaacggacttctggatcgttgtcggtgtaatattatgttccttattatattcctgctggatcttacgacgccgctcagtctcgttgatcgcattacgcatggaatctgtgatcttatcggcatacataataacatgtccctcgctgttacgcgccgcacgtccgattgtctgaatcaaagatgtctcggatcgcaaaaatccttccttgtctgcatccaaaattgccaccagcgtaatctccggaatgtcaagtccctctcgaagcaggttgattccaactaaaacatcaaacacatccagacgcagatcacggataatctctgcacgttccagagtatcaatatccgaatgcagatattttacacggataccgagttctttcatatagtccgtcaaatcttctgccattctcttagtcaaagtcgtaatcaaaaccttgtgtttcttcgctgtctctttattcacttctccgatcagatcgtcaatctgtccctcaaccgggcggacgaccacctccggatcaagtagacctgtcggccggatgatctgttctgcacggagtaactcatgctcatcttcatacgtatttggtgttgcagaaacaaacagcatctgatctatcttgctctcgaattcctcaaaattcaaaggtcggttgtctttagccgaaggaagacggaaaccataatctacaagtgtcgtttttctggactggtcacctgcatacattcctcctatctgcggaatcgtaatatgtgactcgtctacaataatcagaaaatcatccttaaaataatccatcagcgtatgcggggttgctcctgccggaagtcctgcaaggtgtctggaataattttcaattccgctgcagaatccggtttctttcaacatctcaatatcaaagttcgttcgctctgcaatacgctgtgcctctaacagcttgtcttcgcccttgaaatatttcacgcgctcttccatttccgcttcaatattcacgcatgctttctgaatcttttccatagggacgacataatgcgaagccgggaaaaccgcaaaatgttccagactgcacttgacctccccggtcagcacatcaatctccgtgatccggtcgatctcgtctccgaaaaattccacacggattgccgtgtcactgtagttcgctggaaaaatctccactgtgtcaccgcgcacccggaatgtaccacgatgaaaatccatatcatttctcgtatattggatgtcaaccagcgcacggatgacttcgtctctgtccttctccattcccggacgtagagataccatcatgccaagatagtcctccgggctgcccagaccataaatacacgaaaccgatgcaataacgatcacatctttccgctctaccagcgccgctgtggctgacagtctcagcttatctatctcctcattgattgctgaatccttcgcaatataggtatccgtctgcggcacatatgcctccggctgataataatcgtagtaggatacgaaatactctactgcattctcagggaagaactctttgaactcaccgtaaagctgagccgccagtgtcttattgtgcgaaatgatgagagtcggcttgttcaattgtgcaatgacattcgccattgtaaaggtcttaccagatccagtaacgccgagtaaggtctcgaactgatttccctctttgaaaccttttaccagttctgcaattgcctgcggctggtcaccggttggctggtatggggcgtgtagtttgaactccattacactgtctcccttcttgaatctatcaaaaactgaattctatgtttcaataaaaaagacaaaaccattttttatagtattgcatttatacgctaattctactacaaagatttgattttgtctattattcgcagaacatttgttctatttttattaattttaacattacctcaatccgcaagaaaaaatcagagcattcagacaatttctcatctgaatgctctgcacattttatcgttactctgcgaatcttccgcagcactgtttgtatttctttccagagccacatgggcatggatcatttggataaatcttcgctgccgcacgtttcttcggttcagcaggtgcagaatcatctttatttgttccggttacttttgcaacctgttcacgctctaccttctgctcaatcttcacatgatataacagacggatcgtatcttcctgaatgttcgctgtcatctcatcaaacatatcgaatcctgccatcttgtactctacaagaggatctctctgaccataagcctgcagtccgataccctgacgaagctgatccatatcatcaatatgatccatccatttacgatcgatcactttgagcagtacgacacgctctaactcacggaactgctccggttccgggaactctgtctcttttgcttcatataacttcacagctttctctttcaggaggtgcttaagttctttgttattcctgatatcagcaatcgtttcttctgttataggttccagaggaatgataggaagcagtaactgattcagttcattcaaatcccactcgtcttttggaatctcagaagaaatacaggtatccacgcagctctccacacggtctgtgatcatcttgaagatcgcatctctcatgctctcaccattgagtacacgtaaacgctccttgtaaatgatctctctctgatcgttcataacctgatcatattctaacagattcttacggattccgtagttattagcctcaatcttctgctgtgctttctcgatggcagaggtaagcatcttgtgctggatctgttcattttccggaacaccaagtgcattgaacacatccatcagtttatcagagccaaagagtctcatcagatcatcttcaagtgaaatgaagaactgtgattctcccacatctccctgacggccggaacgaccgcggagctgattgtcaatacgtcttgattcatgacgttccgtaccgatgatcttaagaccaccggctgctcttgcgtcgtcatcaagcttaatatccgtaccacggcctgccatgtttgttgcgatcgtaactgctccatgctgtccggcacctgctacgatctcagcctccagttcgtggaactttgcatttaatactgtatgagggattccctctctttttaacatgccgctgagcagttcggaagtatcaatgttgatcgtaccaaccagtaccggctgtcctttctcatgtgccttcttcacttcctcgacaactgcacgatatttttctttcttggtcttatatacggcatcatgatgatcgatacgctggatcggtttattggtcgggatttcaataacgtccataccgtaaatatcacggaactctttttcttctgtgagtgctgtaccagtcataccagcctttttgtcaaatttgttaaagaagttctggaatgtgatcgttgcaagcgtcttgctctcacgttttacttttacatgctccttcgcttcgattgcctgatgaagtccgtctgaataacggcgtcccggcataatacgtccggtaaattcatcaacgatcatgacctcgttatcttttaccacatagtcctgatcgcggaacataaggttatgtgctctcagagcaaggatcacattgtgctggatctcaaggttctctgcatctgcaaggttatcgatcttgaagaactgctcaacctttttcacaccttcctgtgtcaggttgacaactttgtccttctcgttgacaacaaagtctcctgtctcttcctgttcaatacccatgatggcatccatcttggagtactccggcacatcctcaccacgttttaactgtgttgcgagaatatcacacgcttcatatagtttggtagatttaccactctgaccggaaatgatcagtggtgttctcgcctcgtcgatcaatactgagtcgacctcatcgatgatggcataatgcaatccacgctgaacaagctgctctttgtagatcaccatgttatctctcagataatcgaaaccaagttcgttatttgtaacataagtaatatcgcagttatatgcttccctgcgctcatcgttcgtcatggaatttaacaccacaccgactttcagtccaaggaattcatgaacctgtcccatccactcagaatctcgttttgcaaggtaatcattgacggttacgatgcagacacctttgccttccagtgcattcaggtatgccggcagtgtagaaacaagtgtcttaccttcaccggtcttcatctctgcaatacgtccctggtgaagaatgataccaccaataatctgtacgcggtaatgctccatgccgagcacacgttttgctgcttcacgaaccgttgcaaatgcttccggcaaaaggtcatccaaagtctcgcccttttccagacgctctttatattcttttgttttgtttcttaattcttcatcggaaagtttctgcatagagtcacgataagactctactttgtcaacaagcggatagattcttttcagttctctctcgctgtgtgttccgaagatttttgtcaatgctcccataaaaactcctattcctgtccccggctttattaaatttgaacatctgtactgtaaaatttaccagctacaaatctcgcacggtatcgctattgtaacacttttcaagctttatcacaactaaaataggcgtaaacgatttgtgaattttttattaactgaaaaaattcctccacaaacagatatctttatttttgttttatattatgtacatatttttaattataagctataattctattgcaagatgacgaagatactcttatcccctattatttatgaaaggtggtgttttaatgactttaccacaggaaagaatctatactacagatgatatttataacctcccggatggggaacgcgccgaactgatcgatggtcaaatctattacatggctccacctacacgcagacatcagcttatagccggcaatctctttaccatcattaacacctatataaaatcaagaggggggtcgtgtgagccatatatcgctccatttgccgtttttctaaatgcagatgataaaaattatgttgaaccggatataagcgtcatctgcgacaaatccaagctcacagataaaggctgcaatggtgcaccagattggattatagaaatagtatcatctggcagcagacgaatggactattacacaaaactattcaaataccgtactgctggtgttcgcgaatactggattgttgatccagaaaaaaaacggattactgtatacgatctggaacatggtgatattgacgaatactcattctcagatacgatcaacgtaggaatctatccagatttatttatcgactttaacagtataaacgactaactcatgccccggcataacatccggggtattttgattttccaaaaaaagaacttgtcgaacacttccgggatgatatataatgtatggaatcgtatcatcaaaagaggaggtctgcatatattatgaagtatgtatacaaaacaaaaggtacatgttctacccagattgaattagaattagaaggaaatgtggttcataacgtaaaatttaccggtggctgcaacggaaatcttcaggcgattccaaagcttgtagaaggtttaaccgttgagcaggtagagcagaaaattggaggtatctcctgcaacggacgtggaacttcctgcggagaccagcttgcaaaagcctgtcgtgaagcttacgaggcagagcagaaataaataatgcttgtaaagtttgacaaaaagaaaatcgtccagataatatgatttcctttgtgagctttgcgaacaggaacatcatatttcgtctggacgatttttctttttcattaacaatacgaggtttaattcggctcctgaatcaccggctgtatctgctttccattcaaagcatattcaattgtttccggcagtaattccatttttgcaatcagcgaattaggcttactcttgcaattatcctgaccaaacggaacaaaataaacattcttcgtattcataagcatgccaatattcttgaaatttgcgccgagtgcgtcattcgttgaaattgagattacaagtggctttccatttctcatgtgtgccttggctgccataagaaccggtgtgtctgtgattccattgcaaagctttgccgctgtatttccggtacacggtgcgatcaccataatatccagaaaattattcggtccgatcggttccgctgcacaaatggtgcgtatcccctcatttccggtaatatcacaaattccttccacgtaatcttttgcacttccaaacctggtatcacaggtctgtgcattaaatgaaaaaataggaatcacatttgcccccaattccgtgagcctttctatttcctttctggctcttgaaaacatgcagaaggaacctgtaatcccaagtccgatattacattttgaaaagtccattttctataccttcctgctatttttagtcaactgtactacatttgtatatattttctgacacaaacagatttgcgtaatcactccatttttttcgtaaaacgtcctatcgcccgctcaagaatataagcactctcctttggtgcatattttcccggaattccaagaacaagatctgcccggataccagcctcttttgcacatgcgaaatctgttccgccgggttttgaggcaatatccagaatataggcgtcccgtggaagttcgcggatgataactcttgtcacaaccggtgccggcactgtgtttacaagcattgccgcacccattgcctcctccggaccaaatgcaaaatcaactgcgtaaaatccgtcctcttttgcctgttttcttacctcacgacgccttgcaagtaccgttaccctcgctccaagtccgcggagttttaaggcgatttctttgccgcaatttccatatccggttaccagaatctttgcgccttctatattataaggactatggtttacaagttctgcaattgcaccttctgcggttgccactgcgttctcctgcgccaccacttcgtcctccataaaatcaagataacgaattcctctccttcctaagatgtctctctgttcttctgaaaagcatccgccaagcaccaatgtatcgtttttcagatttttattcaaaatttcattcaactgatcctgcttcggaacttttgcaaccggaatcggaagtatcagcattgctgcctctgtaagaaaattttttaacttggaaagctgttcttctgctgtctgactatttctaatgtccaggcagcgcacactgattcctttttttgtcaggatttctgccagatatacctgacgcatatcgcttattaaaagtattgtttgaccgttcatatccctgcacctacgctcccttcattttattatatgaaaaagaagttccacggttccattccgtcattgttttctgaatattttataaaattaacacaattatcattatcatctaatttatttttatttttttctaattttattattgacaaatagtgttttatctgttataaataaattaacaaaaacgagagagaaaaaaattaaaggaggtacaatccaccagaaagagaacgaattacctaatagaattttaaagaaatggaggtacggaccaccagaaacgtaacgatttacccaaaagaatttttaaagaatcgaggtacagtccaccaaaacattaagtgcattcggttttaccttcaaaagatgaactgaaaacatgacaatcctaagaaaggaatcctgaattagtatcagtcagagacattcttatatgatacaattccaaatgtcataagaaaacaatttcagaagttgaggaaaagcgaagaagtccaaatgattgtttcaaggttttgtaaatgaaacgataggcaataaaagttgtttagaagtttcaagtcaaaccagaaacagaaaaacacaagaaaaaagaatagcgaggtacagtcccatggacgaaatagtttaaaaggcggcattgaaagaaaaaaaatttcgatgtcgcctttttcatgttcttatagagttttccgagtaaaatatttcattttacctgcttattgatcgtccgatagctggtgccatgggttttcctcgtccggatctgtcggatcccagcccttgttcggactgtcagtatcaatatgcgccgcctccggctttcccagtggtcccggatcgtcatcatcataaatctcaacagttgttccagccggacaattgtcagctatccattttgcatcttccaccgtaagccgcacgcaccccatagacgcctgctgcccaagtttattatatttgtcggtacacagggcattttttgactttttataatatggaacggaatgaaaaagaacaccgcctgtaattctggtggcatactgaccataaacttttccgtacaattctctccacaagtacttggtagacaaatgaaatacgccgcgcggcgttccattgtataatccggtcgagcagatcattgccttatacggaactgtgtattcgccattttcatctaatgtgtatacggtgatacagttttccttccggttcactttcagataataaggatattctgcttcaacgctggtttctgtgttttcggctgaatgttctaaatcagacttttcctgtgaagcattgctattagaagaatcttcctgtaaatcgttttcctgcaataattctcctggcgaactatctttccgagaatcgctctcctgcaagccattctttaatgaactgtctcccgaaaattcctgtcctaaactatccgtttcctccagcaatacattttccgtgctgtcatccagcttcatctcatcgcttctgtattcttcaaaaatataactgtcagaatcacctgtgagataagataacaccgggagattccactccattcgaagcgccataaattcgagcaccgttaatccgcacataaaaacagtggctgcaattgcgataaccaatgcagccctatttttccatactttttcaattgtcttacgaaaagtagtttgttctttcatttatcctataactgtgtgatgacaaaaatatcgtaaattgctttgatcgcattctcaaaatctgcgttgcttacaccgataatgatgttcaactcagaagatccctgatcgatcatttttacattgatgtttgcatgtgctaatgcggaaaaaatcctacctgctgttccacgtgtggatttcatgccacggccaacaacagcgataagtgccagatcactctctaactcaatgctgtcaggctgtgcatatctatggatagcagagatgactgcctgttcttttccctcgaactccggctgatgcacaaaaatggtcattgtgtcaataccggaaggcatatgctcaaatgagattccgttgtcttcaaatgcagataacacttttctgccaaatccaatttcggagttcatcatatctttatcaatatttacagaaacgaagccttttttacctgcgataccggtgatcgtgtattttgactgatgacaggtgctctcaacgatccaggttccttcatcttccggtgcattggtattgcggatattgatgggtataccagctttgcgcactgggaataccgcatcttcatgaagaactccggctcccatgtaggaaagttcacgaagctcacggtatgtgattgtcttgattggctgtgggttatcgatgattcttggatctgcgatcaggaatccggaaacgtctgtccagttctcataacaggttgcgtgaaccgctctcgatacgatagatcctgtgatatcagaacctccacgtgaaaacgttttgatggttccatcttctttggcgccgtaaaatcccggaatgaccgcacgctctgtttttgcaagacgctcagacagcacttgatctgttttctccggcataaagttgccgtcctcatcaaaaaagatcacttctgctgcatccacaaattcatatccaaggtagttcgccatgatgataccgttcagatattcaccgcgtgatgctgcataatcaacacctgctttatttttaaaattctcggagattttcttaaattcttcctctaaagaaagttttagattcaaaccattaatgattgtgtcataacggtctttgattttcattaacatcacacggaaatcttcatccttctccacaaggtcatagcatgcatacagcatatctgttacctttgtgtccttagaatttctttttcccggtgcactaggcactacatatcttcgctctttgtctgcgcggataatcttgccaactttcgcaaactgttctgcacttgcaagagagcttccaccgaatttcacaactttaatcattttttcaaactccttcgattctgtttctctattgtcaccggctaatctcagccagccgtcactttcctgattgcaattttttctttatcccgttcaggactaacgactatatcttatcataaatgccaatttcgtcaaactgtttttcttaaaataacgcggtttttcagctttttcttcggtttattcaaagttatgtcaaccatttataatttatgattatagcacttaaaatttgaggtaataatactttttttatgcgacggcaagcggtcctgccaaaacgacgcggtccacataaagcgtcatatccggtctggctgccagcgtccacggtatggattgggcggaatataacagaagccaaacggctccgacaattcatttaaaagtctgtttttctgactgttgcacattacttttacttttttcctgctttttttgcatctgactacggtacagatgaacaggctgataagcagaagtattgcaggtattatgatgattgctatgattttttcaagcaaaaaaatccaccacccttcctcgtaaatgagcttcgccgcattttttacagtctgcggctgcaacgctcatattaagatatgccgggtggtggtctttggttatttaccgcgcaagaagtccgcttgcaaggaaatctgccagctcgatcatgttctgctgcgatctcaaatagattgcaatatccgtctcataatcgccgtcgaggtaagcctccatttgctgtcgctccatatcaagatgatcgtagaacattttccgcaactccgtctcattgtatgccggtgtctgcctgctcaaaaaggatgcaagctcctctgcgttgatataccagttttccattgtctctcccgaataggttggatcagcctttaattcgtcggcgacttcatctgtcaggcgcagatgttccataaaaagtgtccgaaatctctgcattgcggaagccggatagtactgtgcgaaaatcgcaaggatgtcttctgcatttttccgtactgcgtctttccacgcattttggctcgacagattttcaaagaaactgatgtgataaaattttacgagcatgatgtgattgagccatgccatacgcatgcgctctcttaaatccatgccattactgctgtcgggctgggtcgttgttcccgggcgcgttggagttgctggctgctgcgctgctcccggacgggttgatgttcctggctgctgcgctgctcccggacgcgttggggttgttggaatgatcacaactccgccgattggattgttattcgggcgatttgactgattgttattttgattgctgcccggacgcgttgctggctgattgccggtatttccagcttctggtctgtcctccacgtaaccttctcccgggcagattgtaagacgcatgccaacctgaagattataaggattcaccccggaattgagcaaaataagttcggttacggttgtatgaaagtgttttgcaagtttgtacagggaatccccttcctgcacacgataactgattcgattctgacaatacatattttcttccataaaatattttcaaattattatatgaaattctgtggcttttgttaccactacatcactcatgctattatctgtaaagtaaaaatacacacgatatcgcttcgtgtgtattttgcctgattattttatgtacttatttttcctgccatgacggattgcaaggattctaactctaaaacagatttacagaaaattcgcatatatcatagcgacagcaacggttaaaataccggaaactgcgatcgacagactgctcatcgctccttcgatttctccaagttccattgctttggcagttccaactgcatgggatgcagaaccaattgcaattccttttgcgataggttcttctatatgaaaaagttttaagatcacgtccgctgttatgtatccaaaaattccggttataataatgaccgcaacggtaatggtcacatagccgccaagttcctctgatacgcccattccaattgctgtggtaattgattttggaagcaatgtaacatattgctgatgatcaaaatggaaaatcagtgccaataccagaatacagctgacgctggtaatcacacctgaaacaattccagcgatgactgctttcatatttttcttaagcagctcaagctgttcataaagtggcactgcaaggcagacagttgctggtgtcagcagatagcttatgtattttgcgccttcctgataatcggcatagtcgatatgaaataccacaagaaaaaccataactgcgatcacggaaattaaaagtggattaaatatcgctatttttacttttttcttaaaccataatccaaactcgtaggtcagcaggctgatcacaactcccaagaaaacagaatctgttaaaaacggtttcatatgtcctactcctcctttttctttcccttacggatcacaaactgcgtaatacttccggaaacgcccataacaaccactgttgagatcaaagtgatcacaaccacctgaatccagattggctgcagcgctccccaggaatcaagcagtccgactcctgccggcacaaacattaaaggcattatctcaatcagaaaattactcgtctctttaatgtctgaaacctttaagattttaaattccaatgcaagaaaaagaagtagcatgccataaatactcgccggtactgatagtggtatgatatgttttaaaagttcacccagaaatgaaatgaacaaaatgatcagaaattgtctcacgtatttcattgttttttctcctttgttttttattccgacttcgtatcataccactgctttttttgaatctcaatacctattttttatgtttctgttttagtccatcacaggcaggattgtccaacacctttccgtccgcagaaaatcttgatccgtgacacggacattcccacgcctgttcctccctgttccactgcaatacgcagcccatatgactgcatctttttccaccgattcttccgatgccggtaatggcatgactgatgttagaaattaattgtggttttaatatattccgcgaaggtgaaaaaatggctgcatattcattttctctttcctgcacaagatccgacaggatcatagccgacagcatagaacctgtcattccccattttccaaatccggttgccacaaaaagatccggcgtatttttactgtatggtccgatgtaaggtcttttatccaacgacatgcaatcctgtgttgcccagaaatactgttctttcacctccggaaaatattcttttgcaatatcacgcagtaaatcccagctgtttttttcttttccggttcgatgtccgccgccacctatgagcagataatttttgtaattgcgcaatgacaagccaatattgtccgcttccagatacattcctttcagatttttttcatatgcgcaggcaaggacataggaacggtgctgatataactttaagtaataggaacctctcgtattgataaatgggaaatgcgtcgcgattataattttctccgctgcgacggagcctttttccgtcagtgcaaagtactctgtcatctcccgcacctgtgaatgttcatagattttcaagtttttgctgataccggcagcaaacttgagcggctgaaactgcgcctgcccaggaaaacgtatagcgccttccacttcaaacggaagtttggtttcttccgtgtaatctgcctgaaagccaaggctgcttaatgcctgcatctcactttctaattttctgcgctccctgaccgaataaagataggaatctgcctcctccatatcgcagtccacaaaacgccccagatttttgtaatgctgcactgcctttaaatttgctttcaaaaaaagttccgcccgctcctgccctaatgactgcagcactttttcataaatcaatccctgctgtgctgtgattttggctgttgtatgcgctgtcacgccctgacaaatgcggtctttttccagcagacaataatcaactcccgcctgctgtaaaaaataagcacacaaaattcccgccatgcctcctccgatgatcagaacctgcgtgcggatatccttttccaaagccggaaactctggcatctctatttcctgcgtccataatgaactcataaatcctccttgtttttgcctattatttgccattagtatgaatttattttttcattcttatgcagacgcagcttaatagcacggtattccatatagtaaaatagtttgattatcaaaatactattgacattctgttccacatggtctatagttcatgatagtttgattatcaaaatattttaatgtattttttattccaatggaaacttatgaatgaatagaaatggagatttttatgagtgtacgaattatcattgattccgcatctgatctgaccaaagagcaggcggatgcattaggacttgactttttacctttaaaaacaatttttggggaagaagaatatcttgacggcattaatttaagccaccgccagttttacgaaaaactgattgaaggagactgcctgccaactacaagccagatttcccctcacgattttgagcagatttatgaagatgtgaaaaagaaaggtgattctgctgttgtcatcacactttcctccaagctttccggcactttccaaagtgccaatattgcactggatgattatgaggactgtatcacaattgttgacagtgaaaatgtctgcttaggcgaacagattcttgtcatgtatgcctgccgtctccgcgacgagggtgcttctgccgcagagattgccaatgctttaaatcagcgtaagaagaatgtccgcgttctggctcttttagatactttggagtatttaaaacgcggcggtcgtatttcaaagaccgccgcgctcgccggaaaccttctttccattaaaccggttattgcaattgttgacggagaagttgcggttctcggaaaagcccgcggttccaaaaatggatgcaatatgttacgcgaagaaatctcaaaatgcaatgggattgatttttccatgccgctttgtctcggttttaccggattagatgacacgcttcttcaaaaatacataaaagacaatgccgatctctgggaatcttatgtgaaagaactgcctatcagttccattggaagcacaatcggaacccatacgggtcccggcggaatctgcgttgcatttttcagtaagacaaactcctgaccggagtttgtcctgcgtcatcttactccaatgccccttttacttttttatgggaaatacaacgttcctcccgattggcaagtgcctttaccctgccttctaacagaagttcccttcctttttcatttcttgtatacacacagtcatagcctccaatatacggatgcatgcattttgcgaaacattccgcatcctccttctttttcgaaaagcaatttggaatggcatagaaaccgttcagtcctttccgacccttctttttcacaagtatgtaacgctggttgtcgatcacatcaaaaaaatcattgacacactgtgcaaacaacgctttatccctgccgcttccaccggacagataaatgatatggttatccggtcccggagattctgccactactttgcagtgtgtttcttccagaagctgctgctcctccaacgctttacggattccatttccaaatgcctttaatctttttaacggactgcccagcatgaaaattttcggaaaacgtatcatgattccagtcagtccgacagcaatgaagaaatagcagattccggctaaatatccatttcgggacgctcccgccacgacacctgccccaattgccccgatcaggaataaaattgctgacagaatcattgtgagaatcgcatcccagaaaacaacactcgtcacaaacttgtctttcacctctgtctcatccacaatatccattttgtcatagattgcaagcgcgctatcccaacgtttttttagcgtatcgcgctgtcccgacattttcagcatttgtctgttaatcctgtcaacatttgttttgttaaatggagttttaataattgatagccgttttattccattttcgatcgtattttccgtgtaatgcagacctagaaaatgttccatccttcgttccagcatactgtaatcttcgctgatctgattgtcgtctgccttcagcacctcatcccacggtctcaggcatactaaatgccagatgttacttgttttttccggctgttctttcatcacacggatagcgcgtccacgcatctgattgcttaacataaatgaaccgacaaagcttgcaaggatcagggaattgatgcaaggagaatcccatccctcccccagcagcgattttgtgccgaccagcacctgaatatagccttttgagaagacattggttaccgcccctgtcagaaaatgtgcatttccaacagccgtcaccttcagataatctgtttcaggaagatttccgatcctgctgaatgtgacttttccacctgttccgatctcctgctctaacgcctcttttgcctccgccgggatgatcacaatcgtcccacaaagcactccaaaacggatttgtttatttttcttttcattttcgcgccggagcatttcaaaaaacggaagcactccaagtgagtttacatcgtattctgtatttccaattgctttttcatattctttccggatgtaatctgtcaaaaccagcagccttaaattctgaccggatgtctcatactcatggaacacaatatctcggatactgttgcattttccaagagaatttgtgagcattttttccactgccgcactttttgtcatgacgacttttttcttctctatcagaccactggattttaaatctgcaattaacaattcgcgatatgtcttgtcacacatgtatgaatccacatcatcatacaaaaatccctgtaacagacgctccatccactgcacgttcatggacggtaatttttttgctcccaaaagtctctgtaatctggacggaaatgcaatatttttgctctgcagataaatcaacagtgatgccaaatatgccggattatccagcagcaggtcatccgcaagctgtccactcagccccttatggcttctcacatacgtaagaaactgtgtatcctgcatcattttttctgtcattgctttgctgcgttcctgaaaacgtctgacttcctgctcttcctcttttgtcggatagttaaagtacacataatcctgatgtgggcagaggcttccctcttttacaagttccggtatcgtgatctcctcgtcgatctctccacacatattcatgtaccgcgtccacatagccggggtggaatcatatggcggtgttgctgtcaacgctatgattttgagattatccacttgttttttgaaatcttctaacgctttccaccattcacttcgcagatggtggcattcatccagacagagcacttcgatccctgcctctttcatcgccgcaaccagatcaaaaccgctgtaatctacttcctccttctctgttgccgccaagcactcgtctgtgcccgtgccactctccgcctctgcgtcttcctgcattccctgaaatcttgtcatggcactgtgcaatgcctgataagttgcaaccgtgatcgcctttggctgttttaaattctgtgaaagaaaatcttctccctgtacgccctcacataaaaaagcttcctcgatccttgcgatccgctgctcccggatcgtaatagacggagctaaaatcagtgcttttccgttcatcctgcggatcagttcaattcccaatgtcgttttcccggaaccaggtgctgctacaatatgtatttttccatctgccatgtacctgtctgcatgttctaaaactcttgcctgataatttctccatgttcccttaaattccaaaatcccttcgtaattcataacttctccttgccgttattgtgctatttaggcgatcacctgcgtaattctgtccagtctcgcataaaattgcggataaaaatcctgctccgtgtcatacggatttatgtaaaaggtgttcagcaaaaacatcgtgatcgtctttttctggttttcatccggcatctctgctaaaatatgctctattttcttgcgaaatgcatgccagtctatgagatattgctgattctgtttcagttgcggcgtatccagccatttgcttacttttaccttgctgcggttctccttcacacagccttccgattgcagaaaatagtccaacttgttttcttcataaatgcgtcccaatgggaaaacacggcaaatgccggggcggaagctatggatgctgcatcttttttcttttagaaaaggacagacattttcctgtgtcattttcaagttcggcaggatcagtccgtctgctacatgcagctctatgttctgctgcaataaattttcaaaggtgcagtttaaatttttcgtcaacatataaatatccagtggatctaacagaatggattctcccatgtcctcacagcacgaggaacagcctgcacaatcattgcaggctgcccgtaccatatcgtttaatccatatcttttcccgtctgaaatttcttttaaatttttattcatttgttaaacctcaatttaataatttaaagtagttgctccgattcaaggcaattttcataaaatcgcgaagcaccttcattatccctgccagctatttgatgccatgcggtctgtcaactggcttaattcatttgggtactgcatcagttcacactcggaatctaatctgtgacgctgctcgtcatttttctttcctgcggttccatgctccagggcattttccaaagctttgtattccctctgtgcttcccggtttaaagtcttatgaacaccggaaacctgtcggttcgttccatagcggtagccatttcctccatgcgcactctcgtactgtccattctcataaacgtattcatcgttcgtgtcatttttgtatacagtctcctttttatccgttggcgcaccattgtatgcactgttatttttttgttttttacccatttcgcttttttctggcaaaataattatatcacaatttaacaattattttttataccatttccctcctgtttattcaaatagtattgcacatctgttttcacagttagggtatcacgtacaagcatttttattcacaagctgcaaagatcgcgtattccattattataatctgcaatttgatattgcataatcaattttgcatctgatttttatctgcttcacgatacacgcaaaatatcaaccgtgtgggcacttgcccccatcaagtccatgcgctctgcgacagacaactggtattggacaaataagtcaaatgtctcctcattcatctctttcaaaacaggacgcatgtaatttgcagctccgtcaggcgctatgattttttctctctgcaaagagactgcttcattgattttctcgatgtcagataatgtaacatactcgtataaatctttttctttggatacacaatggaaatcttgtgtcagtctgccatctgctaagcattcttttaccatgttttccttaaagccatacatcagaacgccataatcattcatcagatatgcgacaaaaataagtccgcctttttttgtcacgcgctttgcttctctcagtgctttcactttatcctcaaatgtatacagatgatacatcggaccaagcagcaatgtcacatcaaatgtttcgtccgcgaaacgtgacagtttcagtgcatttccctgatacgctttcacactgctgcccttggattttaaaattccaaggttgtactttaccagttccactgctgtgacatcatatccttcttctgccaaagccacggaataccgcccggttccagctcctacatcaagaatttttggattatttatttcttttaaataacggtgtatatactccatggtaatgcggtactctacctgtccgtgacgtcgtccgagacgcttttcttcgttaaatttattataatgcttttccagctctgttaattctttagccatatcgttattcctctttcagttcaaacttcagcctatccattccagctcttttcgaatcctatgcaaattctgcgctttctgaaatgaataccgaataattccattatatacacctgctgattttatgacaagtcaaaaacagtttaccctgtccctaaaaacgtgctataatgtgcaaactgtaagaagctattttatatattaaaaaatggagttttagctatgaacgtgttaaaaaagcaacttgtgaaaagaaattatcataaagaaacattaaagattacgattgatatggcatggccagctattgttgagtctttctttgttgcattcgccggactgatcgactctctcatggtcagctcgcttggttcttatgcagtagcggctgtcgggcttaccacacagcctaagttattagggcttgcactcttttttgccttgaatgttgcgatctcggctcttgtcgcccgtagacgtggtgaaaagaagcaggactctgccaatgaaattctgcttaccgcagttttatttattgtgattgctgctgtgatttcaagtgttgcattcgtcttttttgcaagtgccattattgatttttgtggttctactgctgacacccatgctgatgccattgcttattttagcattattatgggcggaatgatcttcaactgcatccaaatgggaatcaacgctgcgcagcgcggtgccggcaatacgaagatcaccatgcgtaccaatgtgacctccaatacgatcaatattattttaaattacctgctgatcaacggtcattttggttttccgccactcggtatccgcggtgcagctcttgctaccgtatcaggaaccgtagttgcctgcatcatgagcgttgcctctattttccgaaaagacagttttttaagtattccttatattatagagcagcatatccgtccaaccgtcactgcgtttctcaacctgatcaaagtcgcttacagtgtcttttttgaacaggtgctgatgcggattggatttatgttaaccgctattatggcggcagatcagggaaccgatgccatggcggcgcatcaggtgggcatgaatattatggctctttcctttgcttttggtgacggactacaggcaactgctgtcgccctgattgggcgcagtctcggtgccggtgatccggatcttgccaaagagtatggacgcacctgtcgtctcatcggtgctgtgattgctgtatgccttgtcgctatttattattttggagcaagtggactatatcatctgtttttcacagaggaacctattgtaacgatcggtgttcagattatgcatgtgatcatccttgtcgtgattttccagatctgccaggtcatctacatgggatgcctacgtggtgcaggagacacgctttacactgcggttgcatccatgatcagtgtcactttcatccgtaccatcatttcctatttctgtggttatgtcctcggctggggaatcatcggtatctggatgggcgtactcggtgatcaggtatcaaggtttatttttgcaacgatacgtttcaagcagggcaaatgggtaaaaatcaaaatctgacaaccggagattaactgggtaatgcaggcagattttatggctacgttataggtagtcaagggcagatataggagaccgttcacaagttaatattattggttattataaagaaaatcgtacaaacgaaatataatgttcctgttcgcaaaactcacaaaggaaatcatatttgtttgcacgatttttctttttatttacgcagtgagtgacttgtgaatgaacctttatctctgctctgctttacgttatgaatgtagccacaatagctgcccaatttacgttgtcgactccggtttactagatataaattgacaagtcacatatatgttatgataaaatattgttatgtaaatcgttaaggaaagaatcgaaggtggtgcaaacgaaaaagcagtattgagacttttcattaactgccctttcgtttgcatcaatttcgattttttctggttgaacaaagcgcgtcaactctatatggacttttaattctgacactctatttataataggatagcgtgtacagatagaaatacataggatttttaattcagtcctgtattacggcatcagaaacaagcctccttaaggaagctaaaaaaacattctgttacgattcattaacagagcatatgtg

SEQ ID NO: 14301 - DNA, 77573 bp, Unknown
  gut microbiota DNA sequence
tgtcttttcttcttgccataaaaataacctccaaactgagtaattttatcttacatcagtttgaaggtttacacaaactttaggatactcccgaaaaaggttttctggccaaactgcaggattatgaacctgtagacttctggggcgaagaatcaaatataaacgtttaatgcaatcaaggcgtcagtccggtatttccggaactgacgccttgattgcattggaaattgtcaatgccactgttttatcttacatatacttcttcacaatattctccattactttccacttatgttccatatcagagacaagtttaaactgtgtccttgcccggtccaaattctgccccggtctgtgaattttaaaataaatgtctccctgaatataatccataagaaacctcattccacattcataggtcataagcctagcgcccatcggaagcagctttatctcttcctgtgaaagttttccaccacatccctctataaagcccttcgcacatgcttcaaaaagctctaaatcgcaccacactttatccagattttgttcatcctctaatgctgtacttgctccaatccgcaccgcatctccaaaatcattcatggctaccccaggcattacagtgtccaggtcaatcacacatattccttttttggtatccttatccatgaggacattattaatttttgtgtcattatgagtcacacgacaactgattttcccacttctaagcaaatcctgaaagcagtccacaatttcttccctgtccaatacaaactgaatttcctcccggaccaaatccactctgctgcacacatcctcttccactgcctttttgaatgtctcaaatctttctctggtatcatgaaatcccggaattgtctcatgaagtgttttcgccggataatccgctaacatactttgaaatctgccaaatgccagaccgccctcataaagtatttcaggattatctatcaaatcatagcttacagtattttcaatgaatacataagctctccaatactcaccttccgagtccacgtaatagggtttcccgtcttttgcaggaatgacatttaatgtctccctctctggatttccaccgttagctgaaatttttctttttaaaaattcagtgactccaacgatattttccattaattcaaccgggtttttaaagatactcttgttcatctgctgtaaaatataatgcttttttactccctgttcgttttcaaatgtaacacggtaagtatcattaatatgtccatttccccatggaatttcttctttatatacaccttcaaaacagaagtttgcagccgcttctaattttccacagagctgttttggataaaaatcattctcttccagctttttcactgctgccataaccattggtttatcttccctgtaggtaactccataccacttttctgttgtaagaagaacttttacttctgctttattgctatctaacagtctgctgacgaccgacggaagataatattcacatttcagtggattatgttgcagaccctcctgcagaaaatcacgaaatccatacgcaatctctgacaaaaatcccttgctaaatccccataaattcatggaaacaatcgtatctcctgccaaatccgtataactttttccatcatcttccgtatatgcagcattctctccacgttttacaatcgttgtatgttctgttacactgacaagttttccatcaccatcaatatcacagacacctcttgccacacttccattctccgtcaaagtatttttcaactgatatcctaccattgcatactgatacttttcattatcttcatgcacactcagataatcataaatctgcttaaatgcttctcttccataatagtcgtctgcattaatcactgcaaatggtccgtcaatcatatctttacagcttaaaattgcatgcgcagttccccatggctttactcttccggccggaacttcaaatccctccggcagattttccagctcctgaaatgcatatcttactttcataatcttttctatacgattccctatgacattatgaaaatcttccgcattctctctttttattacaaaaataacctcttcaaatcctgcaagataagcatcataaatagaaaaatcaacaataatatgtccatattcatctactggatcaatctgtttcattccaccgtaacggcttcccattccggctgccataattacaagtacaggtttcttcatattctttatacctcctgattaaacagcgtaccatttaatctcatttgcctctattttcaacgcaaaactgcttccatctccgcgatagataaccgtattctgtggctcgtaggtattatttacaacacagaatttgccattttttacatatgcatgtacttccacattgaaatttgtactaaaccactgatgtaataagttttcgccatgtgtactccacaaaatgcttcgataaagaattctgctgttctcaaagctatatggcagtccactgatatagaccgaacggccctcaccaaattcatgcacagccatctgaacttctttgtccctctgtaccagaatttctgttccctcatacgcaaacatattcttcttgccctctccgaagtcaacaggctttgttgtatctgcaagaataaagtgatttttgtgttcttcccagttatacttatcgtagtttaaggtaaatccggtttctttttccacaccaattaaatcagcaagctgcagataatgtccctgatactggtgtcctgccggttccccgacaccgataaatccaccgccccggtagacaaattcacgaatggctgcggaaataactgcattctcccagactgccccgccggtgtgtgccgtatccccgtccccgacattgataatgacatcaatatcctttaatatatccttatcctttaaaatatcatcaaatgaaataaatttcacatcaaacggtgcgccgcttaacgcctcgataattcccgcataactgtaattctgtttctgatataaggcatggtgtaccatatggcagccccagctgcggattttgccccagctgtttaaaacagcaaccttcttcacacagtacggtgttgttccttttgcattctcatatagttcacggaattcattgcacacgctctccacatagtccaaaaactccgggaaatctaatgcaagctttaaatatccgccatatccgatacggtcgattggttttcttaaaatggcacggcgtgctgtcacccagttttcctttgcttccttgacaggatctccaccctcatggaaggtatctgggaaaaagtatggaaggaatcttccttctgtatatttgacaccttcaatatcagagatcagacgaagtgtgcttccgtttccaacacttcctaccactgcatcaagaccgatcgttgcaaactcttccataaatggttctgttcctatccagtgatcccccaaaaacatcattgcctctttgccacattcatgtgtgatgtcaaccatctcttttgcaagctttgtaacttccctgcgctggaatgcctggaaatccttgtattctttgcttggcacacgatactggttattatggtaaccctgatcaatgataaattccggacggaatttataaccgacctctttctcaaactgctctaaaatatatggacttacagaagaagaataaccgtaccagtcaacaaacttctctctcttaagctcatcaaatacgagtgtgaactgatggaagaacgttgtataacggatcacgttcacatacggatgctctgcacagtatttgcgcagacgctccatggaatacttatgtgttttcggctgtctgacatcgaatgtgatctgatgttcaaaatccttccagccatttgtcacagcattgtacatatggaccggatcccagatgatgtaagctaaaaagctgactgtatattcatggaacggttctgtatcgtggatgcagacacagccggtttcctcattgtattcccatttatctgtggataccacttcccctgtggagcggtcgatgacttcccaccagcgttttctgtcatctcttgtattgacctgcatcagttcatccgaaattcctttcattaaaggaatctggagttcgttaccggttgcagtgtaaaaattagtcatgatataactctgctgcacttcatctggatttgcttttgcccacgcattatcttttctggtggtataataagttgcatatatttttgcgccggttttggtcagttcctccgggaactctgtaccgtcacagtcacggattgcatccgcaccccagcgtttcattaactcaattgtctctggaaccacatccagatttgtaggaattgtgacacgtcctgtatttttctcactcatttttcttcctcactctatttcatccatataattactttcttttcttcttttctgcaaaagggcaattataaatccacaatgccattaataaacagataattccaataagcataattcctaaacccatcatttttcctgtcataccccatccaaaaacagacaggcttattccggcaataaaaagagctgccattaaaattattctgcattttgtgtgctttttccaaaattccattttaatctcccttctcatcaaccctttaaaccaccaacagtcattccctgtgtcagtttattctgaacacatatatataaaattaatgtaggaagcattactattacaagtcctgcatacataattccatactgtgctgctgactgctgtgcctgcatcagatttaataatcctaccggtaacgttttcggtccatttgccgaactcatcagtgtcatggaaatgatatattcattccaaaaagaaagaaaattaaacaagattactgtaataatagatggttttgccattgggaaaataattttccacatcgttgtactataacctgctccatcaatatatgccgcttcttcataatcatgtgccaatgttgaaaaataccctgacaacagataaattgtaaacggaagtgccgttgcagcatatacgattgcaagtatgaccagattatttaaaagaaaacttttcccaattactgatttcagccaattgtctccatctcgcagcatcagaaaaattggaacaacaatataattcacgttaataaaaagaccacccataaaagccgcatttaaaaatttgcttcctttaaatttaaaacgtgacaaacaataagctgctggcagtgcaacaattaaaagaattacaagtgccaaagctgtaacaaatgcggagtttaacatgtaatctcccatttttgctgtattccaggcatcaataaagttctgaaaataaaaaccctccggcaaagtccacggatttccataaaattctttattctgtttgatagatgccataaatacccatgctaccggaacaataatgatgactgcaagcaatattaaaactacataaataaaaattttatacaaatgctcggtagaattcgaatgtttcttctctttcatgttttttctccttaaaattccagtgtttcccgctctgtaactttatttacaagtgcagataatgcaaatgagaaaatgaatatcacaacacctattgacatactatatccatataaacccgcatctttttgtccatacatataactcaatgccacttcagaagccccatttggtccgccggaagtcattgctttcacaaataaaaatgccatattaatcgtcgaaataataaagaatgtcagtgttgtgcgaatatttgtccaaatcagaggaattgtaatctgaaaaaactgaaccattcttccagccccatctaatccggcactttcataaaggctttccggtacgcttgccatagatgccatatacattaccatataataaccaatcgcctgccataccatggcaataataaggcttaccataacaagagactctcctttccataaaattggattttccattttatggaataagcttataatactatttaacattccgttctccggcttataaattgcagaaaaaatacctgcaattactacaaccgataaaatattgggaatataaaaaataatacggaaaaaattctgtcccttgattttttctcttgacagaatacccgcaaaaacaagtgcaaatgcaaaggtaactattgtaacaacaacaataagtaaaatcatgttttgcatagatcttataaaattagtatccgatattaatgttttaaaatttttcagaccaacaaatgcttcattcggtgaatatgcacccttttcaaataacgacattcggaatacatttaaggtaggcaatatcataaacacaaaaaataaaattactgcgggtgctatgcataccgccaaaaaaccgcttcgtcctctggcttttttcatactttcacgttcctttcaaacaaaccgtactatttaaaattcggcggacaaaaatcctgtccgccgactcatttttaccactatagcattaaggaaaactaaaaactcttatttcaaatttgcccgcatctggtcacttgccgaaataattccatcaatccactcctgctctgtcatatctcctgataccaaagagtttacagggtcaaagaatacagtacgtacttcaatacccggaattgcttcaaatgatgcaaaattgcccatggctgcctttgctccattatcatagatagaataaaacatgacattatcaccttctaatttatctgcaattcctaataccggctgaatagctcctgcttttgcaaaaatttcacatgctttatcactgtataaatatgagataaataattttgctgcatcctgatgttctgcaccagaaggaatccatgcctgttcaaaccatgtataactataactgtctcctcccgcttttaccgccggaagagctgtcataccccacttaaatccatctgcacgaggagcatctgccatttcaccgacaatccaggttccatttggcatgaaaattgccttattatcaagtactaactgctggttctgtgtaaaatcctgatcatttgcctgtgccggtgtaataggatttgtgtactcagctaactttgcaacaatatcaaaacatgtctgtgcttctggtgtttcccagataccttcttcataatttgtggccttatcaaagaattcagatccgcctgcggcatacattaatgcatagaaaaatgcatcaaaatatcctgttgtcggatatgtaaataaataaattccctcttcttttgctttatctccaagttcccacatttcatcccaggttgttggaacatcccatcctttttcttctaaaagacctgcattataaaacagaccacatggggaataaaacattggtgcaagatatgtctttccatcaccataaggattcgtcaatgatgtatctgtaaatcctcctgcaatcttctctgaaacaagtttatcttctcccggaactttcatagataagacatctgtaatgtcagtaatcatatttcccttaataaactgttccgttaacgcagcttcacgtcccgtggccagatgaataacatccgggtattcgcctccctgcatggatggtcctattacatcctccaattttttatctgttgtaagttctacctgaattccggtttcttctgtaaatgcatctgtcacttcctgccacatttgcgaaccataacctgtctcaattgcggctacactgattgttgttcccgcataggctgcgtatggattatcagatgttggctgctctgccgcctctgttcctgtttcttctgttttgctgttatctgatacagaagtctccgttcctgttcctgtgccgcaccccgcaaataaagatgctgccattaccatgctcatcattgtacacaaaatttttttcttcatagtaacctcccgtttttgttaattttcactataaactcttgtgttttccttcttgcaattgttattatagcgtatattttttctttttcctatctatatattgctctctattttataattcttgctttatttttaaaaatcttgttattttgcttttttcattgtatactaagtacaacaccgttcctatataaataggaaatcattgcaattataacatgaaaggactgtattttccatgagtaaccgaaagtttaatctggataatgaggtacagccggaaatccatttccgcctgctttccatctcagcatccaaatttgaaaatgactggacttcttttccccacagccatcattttacggaaatcttctttattaaagaaggaaccggtcatatgcagatagaaaatgaatctgtcccggtctcctcaaacagccttgtcgtgattggtgcgcaggtaacacacacagagttttccgatccgaaaaatccactggattattatgtgctcggggtggaaggattaaaactgaataccgacaaagaaccggaatacattcacgtccctgcttctgcaaactcgccttttatccgccagtgttttgaaaatatcctgcgcgaaatgcataataaacaggaccgctacgcagagatctgccagcattatctggatattttaattttatatttctgccggaaagaccatgtatcctatgaagtggtggatgcgcagaacagcagccacgaatgccacaaggtaaaacgctttatcgaacacaattaccagagcatgatctctctggattcactggccgaaaactgcagtctctcaaaatattacctttcacaccgttttgcagagctttatggaaaatctccgatcgcgtacctgaatgaagtgcggctggcgtctgcgcgtgacctgctgctcacaaccaatcacagcatcgaagagatcgccggatgtatcggtttttcctctaccagttatttttcgcagtccttccagaaaaattttcatgaatcgccacagcagttccgcaaatcccaccgtgtcaggacatgaccatttttcattttttacataaaaaagaccgatctcctgcaaatagatccgttccagaagaggcggcatcggaaatcccgatgccgcctctttcgataatgatttttatttaattataaggttttctttttatttcagcagacggaaggctgcatattaaggctttttacatgctggtcattgatgtaaccgcaggcttttaaaccagcctgtaaaacagaattcagatttgcacctgacatctgctgtatggtatgatcatcaaattcgatcatgtaagtccgttcgctgtcgtctttatcgcagtctattttatacatatttcttctgctgatcgcaccgatctcttctaaggtattgatcatgcgatatacggttgctgtgccgatcttaggatcaattttggatgctttataatagatttctttacagcttgagcaattttcattcaatataatatcgagtaacaccattctctgctttgtaatcctgcatccctgctctttcagccgctgaatcacaatttcacgctgcatctgggttctctcatacttctgctgattttcctgttgtttctgctgtactgacgtatgctgattcatttaaaaccatgcccttcttatcacctgaaatttgtggttatcattaaaggcagcttctgtcactgtctttgttttctttattaatggcagcctctgcaatgtgaacagtcaccgccacaggaagattttccacttttcttgtcacggacaattcctctgacaatcagggctactactgctattaatactgctaatacaacgaatgttcccatatgttctaccgcctttctgataaatcttttttaaggagaagcctctgtatgagaggcctcatcctgtaaatatctgttattttgcgcttactactttctttgtgttcacgtttaaagaattgctctctttgtatggacggaacagtaagtataagaatccgatcacaagtaagaatgctactacagtaccgattccaaatgctcctgttgtgatgagtgttccgatctggtaaatgcaaagtgatacgacataagcaagaccacactggtatccgattgcgaaccagaaccattttgcattgttcatctcacgtttgatagctcccattgctgcgaagcatggtgcacaaagtaagttgaatactaagaatccgtaagctgcgattggtgtcatggctgctgccaggttgccccagatttcagcaccatcttctgctacttctgcgaaaccatataacataccgaaggttgctacaacgttctcttttgcaattaaacctgtaacggctgcaactgccatcttccagccttcaccagcctgtgtccagccaagtggtgcgaagatccatgcgattgcgctgccgatagaagcaaggatagaattatttaattcttctaccataccaaagcttccgctctcccatccaaagctcattaagaaccataatacgattgttgataaaagaatgattgtaccagcttttttgatgaaggaccagcctctttcccacatacttcttaatacattagaaacagttggccagtggtatgccggaagctccataacgaatggtgcaggatcaccagcaaacatttttgttttctttaagatgataccggagcagatgattgctgcgataccaacaaaataagcacttgttgcaacccatccggagttattgaagaatgcacctgcgatcatggcaatgatcggaagttttgctccacaaggaatgaaggttgttgtcataatggtcattttacggtcacggtcgttctcgattgttcttgatgccataacaccaggaacaccacatccactaccaattaacattggaatgaaggattttccggaaagaccaaatttgcggaagatacgatccatgataaatgcgacacgtgccatgtatccgcagctctctaagaaagccaggaaaataaataatactaacatctgtggtacgaaaccaagaactgcaccgacaccggagatcacaccatccacgataagtcctgtcagccagtctgcacatccgatgccttcaaagaagctctgtgctcctggaatgatccattctgcaaataatgtgtcgtttgtccagtctgtcaataatgctccaacggttgtaacagatacataatatacaatgaacataacaagtgcgaaaataggtaatgctgcccatctgtttgtaacaaaacggtcaattctatcagaagttgtcagtttttctttgctgttctttgtcacacattcgccaatgatagaagaaatgtatacgtatctctcatttgtgataacactctctgtatcatcatcaaatttatcttccatctctttgatctctgcggatacatccggaacgtttgtcatcatttcattgatcttgtcatctttttccagtaatttgatcgcaaagaatctcttctgttcttccggcattcctgaaatcttagcttctacttctgaaataatatcttctgcatctttggagaactcatgtgcaacaacggtggcttttctgctctctgcaagttttacggccttctctgccgcttctttgataccggtaccttttaaagcggagatttcaacaacttcgcagcctaatttctggcttaatttgtctgtgtggatcttctcaccgctcttttccacaacgtccatcatgttcactgccatgatcaccgggattccaagttccattaactgtgtggaaagatacaggttacgttcaatgttcgtaccgtctacgatatttaagattgcatccggtctctctgcgatgaggtagtttcttgcaacaacctcctcaagtgtatatggagataaagaatagataccaggtaaatccatgataacgacatctttatgtccttttagttttccttcttttttctcgactgtaacacctggccagttaccaacgaactggttggaacctgtcagtgcgttaaataatgttgttttaccgcagtttgggtttcctgcgagtgcaattttaactgccatgatcaactctccttctttgcttctatctcacttttccattgctggatctgcatgttttctgtcccagaagtatgcatgcactactcattttcataacctttttgtctttttagttagtcttatgtaacccataaacaaaaaaattattctacctcgatcatctctgcatctgctttacgaagtgataattcatatccgcgtacagtaacttcaacaggatctccaagtggtgctacctttctgacaaaaatatccacaccttttgtgatacccatgtccatgattcttctcttaaccggaccttcgccagttaattttttgacttttactgtctgaccaacagcggcttctttcaatgtcattttctaacggctccttttttctttttaaaaatcatctatcagcagacaggaacgccctgccattgcttacttttgtcacagaccggcactttataccatgatcttgtttgccatgtcttttccgattgcaactctggaatctttgatattcacgatcatattaccgccaatctctgataccacagtaacagctcctccgactacgaatccgaggttttctaaaaatcttctggtttcttcttttccaccaacttttttgattgtattttcttcacctgttttgaccattgttaaaggcatcatctttccctcttcctcatcttccaaaagactattgataatctttttcgtttctacgttggttagtataatctaacggtagttagttgtcaataacttttttataattttatccagattattttcttttgtatggttgcacaaaatttttattatttccaaatgtaatttcagattataaaacaaagagtcgcatcctcacggagtgttttgttttataggaataatttcctataaagcaaaaaaagaagccaccacactttgattgtgtgatgacttctttcgcattttatttatgcctgttttttattctgtttcaattcttttttccatgccatatagcttgtgtactcttcgctctttttgaacttgcgttttttcagaatgaacatcacaagtgaaaggatgaatcctaccacaccgatggtcgcaattgtctttaagatcacaagtaattttggctgtacaaatttaatggttgtattttcgccaacaccgttcatagcaacagagtttgctaatacatacaggtcatggtggcatgcctcacgcattgctgttaccataaccggatcatttttatatgccggcaattctttggtcacatacggcatcatggcatcataggttgtaacaccacctgccatcactccgtccggaccattgacatatgggttaagaacgttatctgtgatggtaagtccattgctgccccactcatttctcatgattccggtcatcaatcctttgttacctccggaccagatgcatccccaacgtgtgtaagcaaccatggttccgtttgcatttccttcttcaaatacatcctggaatgcttttaaatatatttcacgtgctgcctgctcagtgagccatacgccaagaccgatacgatcctgctcgcagtcgtttaatgcaaagtgtttcattacaacatgaacacctttttcctggatagctgccacttcgtaagcactcatttttccggaaaggaatccgtcttcactgtagtactcgaagttacgtccaccataaggagttctgtggatattgttacccggtccgtaaagaatcgcaacgcctgcagacagacagttattaccgatcactttaccaatctctgtcataatatccgtattgaaagttgctgccatcacatcctcagatgtaaatgcagttgctgtcagtttttctttatccgtattgccgaataaggaagcagtcagtccctgtggtccgttctcatcacgggaacccggagcctggattgatttaatcggcattgtccagtggaaggagtcgccgattaaagttaccatctcatcataggtaagctggtctaataaagtatcccagtcagcatcgtcgtaatctttaccgatcatatcgtataaagtaagaccattttttgcacctaatgtcggcatctctaccgtatcataatctgctgcatcatactgaactacctgcaggtcatcgatcatagtatctgttaatgcaaataccggagattctgctgggaatgttccctcccagtcattacgtgaaaggtaagttacggagttatctccggcaccttcgtaaaggttcatatcggaatcagataactggtttgtcacctctgcaccgctcttagatactgcataagtagtggtgtctaatgtatcatttgtccactggaatgtaagttctgcattaccttctgcatccattccattctcagttgtaaatccttttgctgcaagaatgttgttcacagcattgtgtgcatctgttgctgctgtaaaatagtaatcgcctgcatctaaaatgtaagtacctgcaccatatgcatcataagatgcgatatctgctctgtctacattgattgttaatgtctgggactcacccggagctaaaatatctgttttgccgaatccgcataactgtactgcagatttctctacagaattctctttgtcatactctgtatatggagactgtgcgtaaatctgaacggtctcttttccagaataagtatcgcctgtattggtaactgtcacattaaagttataggaatctgttgcagcatcataaacgcccgtcatgtcactgtactcgaaatctgtatagcttaatccataaccgaatgggaatgctacatcatcgctgtatacatagcttcctgcatttccggttcccataaccgtgtcttcataacgtgtttcataatatttgtatccaacgtagataccttcctgatataccatgtagctttttgctttttcaggaaccagttcttctgtatagccttcataagtaacaggggtaaagtttgccatagccggggaagacatattatcgtagcaataagtatctacaaggcttccggatggattgacgttacctgcaaggatatccgccactgcattgatacctgtaattccgacatcgccgatccacagacaggcatctacattataagtattgtcttttaagaaatccacctgtaatgcatttgcagagttgatcagcacaatgatcttgctcactgttccgtctgctttcattgctgccacattggaaagcatttctttttcattgtcatctaatgcaaggtaattgacatcaccgtatgccaggtcagccccctcaccacctacacgggataatgtgacgatcgccgcatctccataagagcttacagaatctttcacttcgtctgtgtactcattccatgggacttcagttacaacggcacttgcagttgcgatcgtaccacctttgccacgtttgtacattcccatctcttcggattcatagaagttccagagtgtttcatttacattgaaacctgttttttccattgcagtttttaaggtgtctgctgtggaagcatcaatgttaccggatcctgtaccaccataaacaaggtttacagatgaattggaaaacagactgacattggcaccctctgccaaaggaagtgcattgttctcattcataagaagcgctgcaccttctgcctccacctgctgaacaagctgtaatccatagtcaaccatatcttctgcagactcaaagtcagaggtaaagtactgtgcgctttgatcctcattctttaatttccagaatgttcctccgacgaaaatagccagtgaattatcaaaaacatttaataaactgtacagtggcacaaagatcactgccagaattgcacatacaattgataatcctttccatggacggatcgctctgtgttttgctttacggaaagccttcttacgggctttcacttcttttttgttctctcccataaattttctccatttcttttttcaaacttcgtcattttgacggaatttatttatgatgtgtccttattttattaaaattttgttaaaaaatcaacaaagtggacttagtcggttcattttgtgacgtaagtggcataaaaaatacagcctataagactttcatcctataagctgtatcttttgcataaattatgttttctataatttttattttaatcctttggtcaatggaattaacattaacagtgcgataatgccgacaagtccgatcacaacaccaagcaccatttttccgaataccatgcataagcacattccaattccaaataaaagtgctccaaagatagataaaatgattgtgccaactgtttttccacttaaatggattggctcttttccttccattcttctccagacgatcaacgtgatgaaaagaattacaagtccgatcactcctgcgataactccctgcctaaacattccccattcctcgatcagtgccatgcacattccaggtgcaaaaaataccattccgattgttccaagtattaatgctgcaaaattactttttttcatgtttgtattcctccactactttctttcctacttttcctgtttttaactgatattcagccataatgtattcctccgtttttctgttggttttgattgctttactttatggactgattctagcgtccgattgtttcgttattgcttatgttttgttttagaattgttaatgtttgggggaaaattaaaataagacttttttgatatgactttcgatacttgacccattagagtgcgccgcaaggcacacaaactaaatatccgccatatcaaatcggatatggcggatacatttagaaaaacattttaaatattttgctcgtctacttgacaagagagtgaccatatttcaaacatattcccttcttcttacatccgatttcaaaatatttataaaatatatctcacattaattcatatgttttcttgtagcatcttcctgtcgcttcttctctgcttcctgaaagattctgtccgcttcttccttccgtttcctttcttcctctgcaaaaaaggaaagcccttcttctgtcgttacgaatccgttttcgctgctcaagttatctgtgagtgtcgcaagatacgaaatcttggaacggataactggatgctgctttaacgtgtagacttctccaatctccaaacccgtgacatccagaaaatgttttacagccggttcaaatagcttctcggcatatgcaccctgttctgcttccatctgtttcgttaagcgttcgtattcattccgatacggaagatcggtcagcataggttctttataaatacagacatccatgcgttttatcccatgaatcttaaacagtgcgacaatttcaggatacttggttttcggaaaccggcagtagtacccgataaacttcccttttacctctcttgtgtacttgttgtatttatctgcttcggttatatacacctttgcataccagatcaatgcagccgcaaatgcgattgcaagaaggaaatgtacctgccagagacctccaaatccaaatactacaaaaaagaatactaatgcggctccgattgcactaccctcatcctgaatctggcagtttttctctacctgatacagcccaacaaatagtcctgcaatagagaggactacagcggaccacagacagttctcaaaccatatctctggaagcaggaaatacaatggaattaacagcagtattggaccgaatatccaacatatcagcaagccagattcccctgcaatcttatcctgttcacgtcttgaaagcgtgttatatccttcgacagacttcaccgcctgtcttgtattcatcattttttttaacatcatctatctcctgtaatttattgatcaatttaacattggtaaaatcattgttttatacctccttgtttcatagcctctcgcataccaccctgcaccgttttttatggaatgcaatgccatacgctaaaatttcacatctgccattctccctgagtgcttcatcgtatctgcgatttttaatctgcgccattgcattttcacatgctttgtcaagaccgctaatagatgccgcatgctttacctcaatgataatgcctgcatccggattctccggttctatgagaatatcactatacccgtctcccgactctctgttcgattttatcagccagtccgggttacttccccgcagcaaacctaataacagtccatgataaaagttttctttctgttcctcacgcgcttttgtatccagcacactgatcatcctgctcatgataacattcaactgtttctgcaatccttctgcatccgcttccaaaattgcctttgaaaactctggcattgattcttcttttgcaacagaacgctgaaaccattcctgtatttgcagaacaaatacctcatgaacttccctattcggaataaccagctcgtagacaccactctctggatttcctatattcgtaagataccctgttgtaaataaaacactccatacattatctatgctgttctcaatttcatcgtaggttaaatccagacgaatcctttttgttaccgattctccggcaacaagccgctctatttcatccttcgttgattgatctgccttatccacgaaaagttttaccagatcatttccactgctattgatccagaatgcacttggttttgcattagaatctgtcaataattttttcacaaaattaatgacatcccacggacagtatatatcggcgttgccaaaatgatatccatcgtaccactcttttatatccgaataacgatttgtacaatgataatattttagcatctgcatcacttctgcatctgtgaatccaaaaccttcctcatgctctatatcaacgatcgaattaatctcaaaattattaagtccggtaaaaatgctctccttagaaacacgtaaacaccctgtgagtaccgcaaactgcaaaaattcatttgtctttagcgcctgcccgaaaagtcccctgatgagcgaaaccatctcctgataatacccattcttaaaagccttatccaacggaacatcatactcatcaataaggattaccactttctgatcgtagtgcagataaagcaactgtgaaagcagtcttaaactgtcaacaagattaacgtcctcattcaaaagcattttttcaaattgttttcgatcttcaaccgtcagcttatcacttgttttcagataataatgtctccggacctcgttattaataatggtcataagcattttctgtgcatctgcaaaatgaagtccctctactcccttaagcgataaaaaaataacaggatactttcccatgtattccgcacacagtttttctttttccgaaatatacaagccctgaaaaagcgatttctctgcaccaatttcaaaaaagctctttagcatactcatattgagtgttttgccgaaacggcgcggtctggtaaaaagagtcacttcaccccagctttgtaaaagctgctcaatcaattttgtcttatccacataataaaaacccgcttcacgtatttttttaaaatcatctattccaaccggtaattttaatgtatcattcatggaagcctccaaaaaaaatccgctatactatttacatagtataacggattcctactaaaaaaacaattctcttactttattcctgccggaattcttccggtacgtcctcataagttttccatttgtccatggcatcttccaatgtcatgccttcgcttaccgcgtgttttctcgctgcattgactgcctggatttctttcatctttgctccggttaaggtgtaacccttcatggcccagagtgttgcaagccatgcgatcattggaacgatacagaacaggattagaacaacgccatgcattccggaagaatatggtgttttgctgtccggtaaagtctgaataccgatcattgcaactgccgctcctacaattgtagatccaagggagcttaccaatttatcaaccagtgagaacagtgttcccatgatacccggcacatactgtccggaacggtaagtctcgtaatcagaacagtctgcaaccattgggatcggcatatctgcggttgcatagtatgcaccataaccaacaccaaaaaagatcacgaacaaaacagtgtatacattaattgatcttaagcttaagttaaatgcaggcactccctgtttccataacagtaacagtaccagaacaccgatatacatcaccagtgcaagcattgtgtagcgtaccaaggacgctttctgtccatgcttctgggaagtttttaccgtcaaaaggaagaatggcacagagaaaatatatccaacgatcatcattggaagatacagtccgccgtagtctcccatcattgctccgtataacatacataaaactgtcatgttcgttgcaatggaaaaggcaagtttgcatcccgctcctgcgaccataagacgctgcagctctttgtttgcttttaaaatagcaacatattcttttaattttactttttcctgtttattgccaacaccaaaaaattccggtctgtctttctcccagataccgatcacagcaagaagtgtcagaactgcggataccacgatggcaagggggatcataaaatcaaaaaagtttgcgctgttatagccgccaagacggtcacctaagatcggtgccaaaaactgtacaagtcccataccgatcaggctggcgatcgtattaaaaatagtaaacatcgggcgctgtttcggatcgtttgtcagacaagtctgtccggaacgggtacaggccgtctggaatgtgtatccgataacatataatgcataaaataacacaaaacatacatagcgcagccactgcatgtccggtgcgatgatcctcgttccaaaatacagtaaaatggaagaaacgatcatgatcacatttccgatcaccatgtatggacggaatttaccgaattttgaatttgtccggtcgatcaaagctccgatgatcggatccgtcacggcatcaaaaagacgcatgacggttaccattgtcgttgcaaacataagcgcaagtcctaacactccgtttgcgtaatatgcgataaaattcatggtgaggatataatatacatttgtcgcaccattgttcatcggaaacagcacaagctgatacggttttgcccggttcattccggctgcctgtgcagtggttttttctttttgattactcattatttcttctcctttggaatatcctgctaaaatctatacccagttttcactctttttcgcttcttttttcagcttataatcctgattctctttttcagtgtgacaaagtaccatggcatccttcacacttccggctacggcttcgatcttattctctttttccataggaagctggaaggtaaaaatatgatttccgctcttctgctcaatcagctctccgttattgtataaggatacgaccggctggtttgtgtaaactttaatggtcgttgtatcctcagaacggtcactgcggcgtgatccacacagatgtacaaatggttcgtcactccaatatgctttatataagaagaaactgtctttctttgtcttgcggtcaaatgtcacaagtcccttatggttcatgcccggctcgccgccctgatttcttgcgtccgctgcaaaatcgaacatattccacacataagtgctccacataaatggatgacgttcaaaacatctgagcatatactcatgatatcttgcctgatattcctcggtatgatctccacgtctcggtcttctgctgtgaaggttcggcataccttctgcaccgtactcggaataaccgatcggacggttcgggaataccagatggaaaaatcgtaaaaacaggtcattcaggaaaaatcccggcacataccatccaagatataaattccatcccaccagatctgtgatgtgtgcagaacggttaaacggtccgcacatcgcataacatgctaaagttgtcagtcttgtcggatccatcttatggcagagatcatttaacacatgatgattgtccagcatatcttttttgtcttttgtgctgatggtgatctcattggatacgccccatactacaattgacggatgattgtaattctgaacaatcagctctctcatctggctgatggtattctctcttccgcccggcatatgttccgaaatatatggaatctctgcccatacgaccatacctctctcatcacagagatcataaaaatactggtcatgctgataatgtgcaagacggattgtattcgcaccaagttcacagatcagatccatgtcttcgtcatgatttttcgtggaaatcgcatttccaagtgctttaaaatcctgatgtctggagacaccgtgaagcggataatgctctccgtttaagaagaatcccttctttggatctacataaaatgtacggataccaaagcggtttgtgatctcatccttcacttccccattgactgtcaatgttgcagctgctgtataaagatacggattttttcttccgtgccagcagattggattctggatgtttaagttcacgtcgcatccgtctccttctgcaactacctttccgtcctgatctttgatctgtacgcacacctgtgcatcctttgtattcgtaaatgtttcaatatgaacatttgcctcgctgtcttttacttctggtgtgatcttgattccgttgcttccaaggtaatctaagtcaaaatgctcttttgacacgatcaggaaacggacatcacggtaaattccgccatagaacgtaaaatccgctttctgtggatatatttttccattgacagagttgtccacagtcacttccaatttattctggtcttctaaaacctctgtgatattgatgcggaatgtggaatagccaccatcatgatgtgcaagttcttttccattcactgtcacatcactgcttgcatttacaccgagaaactccagatatacttcctctgtctccggatcaaattccggtttttcaaatgttttctcataatgacaggttcctctgtagtaatcatttcctccgtcctgtccgtcttttgcattccatgtatgtggcaagttcacctgctcttgtctgttgtcaggtccaatgaaaagccactgctccatcagattttgaattcgtcgcatataacacatcctttttattatttatggtgcctgtcactttgtatcgtttcaggctatttttatatattgttccaatttcaatacataaataataaataaaattcgttaatttttcaacgaacctgacttagtcggtgcattttatgacgtaagtggtgttctaaggaaacctgtcggaatatggctgcataatttcaaaaaaagccagcgtctgttctcctcgattaagaggctcactgacgccgactttttactttacaggtaacagcacttcgaggttaaagcagcccatttccgtagatactgaaatgtcaccgccatatttttctgcgatatgacggatactctttaaaccaattccatgatactgtttattcttctttgttgttttcggaaggtcattttcatactccggtgtgcgttccgtcgggttggaaaaacggatatataaaaaatgctgtttttctgccacacagatatcgataaaacgcatctccttctcggaaaacttttccacgcactcgattgcattgtctattgcattgccaaataatgcataaatatcaatggaatccataaaaaacattttttttccgtcaatgacacaatgcatcgtaatgtctctcgcctcacagatcaggcttttctccgagagcagcgtatctaaaatctcatttcctgttttcacgattgaatcgtagatgcgaatggatttttccagctcttttaagttcttctcccgctccgttggattgtcgatatgccgcattgccgccacctgatatttcaggtcatggcacttgcggtcgatcacctgcatctggtctttggcaatctcatactgctttttctgctgataccacatccgctccatgagcgcatattcctgcttcacttcactttttttgaaaagctccgcctgcagatataaaaatgtcacacagtaaagctgtaccagaaccgccagattcgattccccacgattctgataaaagttataatacgaatacagggacaaaaaaagtaccgccgccgcggaaagcgttcttctcggtccagcctgataaaaaccatttctcggaagccagcggaacaatgtgatcgcaaacaccaaataaactgctgcaaaaaataacagtgaaaaaatatactgcatcactctcggctgctggtcaatcgcagagattccatgcagactgttccagaaaatattcgtacagtggtaaacgatcatcggccacacggaacagtagatcatctcccagcttattttcccgctgatcagtccaaccgcgatcatcgtgatcagaaacctcatgagaaactctaagatcagattctgtccggtgaccggaatcagcatacgcacaagcagcatcacaatccatgccgcgcagaggatcagtgcgttttttaacttattcttttccatgatatgtagtggcataaggaacagatacacacatgccagcaataaaaaatcctgaaaaatcatcataccaaaatcccgaaccattgttaacttctccctacactgcgaatgagcgctgtcataaagtttttcttgctgcggcggctgatctgcagtttttcgccttccacaatcaccgtatcatcccggatctctgcaacatgcgtcagtcctaccagacaccagttgctgcattttgcaaacagtccctttggaagttcttcttccacgttcttaagacttccgcgcatctcaaaatttccctgtctggtgtgataacgcagcacatgattctggatctccacataataaatgtctctggaatcaatctttatcatgccggttcctgtctggagcatcacgggcttgcttccccggttttccacaagctgcattgcacgatccattttatttgcaaaattcagatactgaatcggttttaaaacgaagtccaatgcgccaacttcatatcctttgatcgcataatgcgccatattggtgataaacatgatcactacctgcgcatcctttttgcggatctcctctgctgcatccataccgtttgtgcccggcatttcaatatccatcagaatgatatcataatccccctgataaaccgccagaaaatcatccgctttctcaaaaggcgtcgtctcgaatgtcgttccacgttctgtttcgtattgtctgatataagtaaaaagtgtttcacgatagccctgatcgtcttctacaattgcaatcctgttcatgtgtgttctgctccatttttatgaatcctgcatgtctgccggattcctctttacctgtcatttgccgtattacctattatacccacttcaatttgcagtgtctagcttttcagtcagaaaaagcgtaaatccaattttgaatttacgccttttccttcaaatatttttcataaaattcctatcggtttacttcactgcttccgtcatcttccagatcaaaatgttttacaagagattccagagtagcagcctgtgccgccaattcctccgaagttgcagatgtctcttctgcagaagcggagttatcctcaactgctttggaaatttcctcaataccaagcttaatctgctcaatgctctgattctgcgtctgattattctctgcgctttttccaatcataccattgacattctcgattgcatctaaaacttcctgcatagatgaaacaacacttgccgcaagttctgtaccacgttcaatttcctgaatcgaaacgccgatcagatcttttgtattatttgcagctttagagcttccctctgcaagtgagccgatttcagaagcaacaaccgcaaaacctttacctgcttctccggctcttgctgcttcgatagaagcattcaatgctaacaaattcgtctgatctgcaatatcttcaatcgtcttgataatgctgacaacttcatttgaagtttctgtaatcttgttcattgcctctgtcatctgatccatctgcattctgctgtcctgcatcatctttgtgacacgcgccgtttcatcggctgacttcaatgcatcttccgtattctctttgacctgctctgaaacggaaacagaagttgccacaagttcttctacagaagctgcctgtgtgcttgctccttctgcaatattctgtgctgctcttgaaagatcatctgcgccggctgaaacctgtgcagaactgttaatgatattttcaatcatgccctgcagggattctgagatatggatcattccatcttttacttttgcaaactctcctgcataatcatacttcaatgtaaacttcagctttccatctgacaaacggttcagaacataggcaatttcatcaatataattaatatagtccttcaaccggtctactgtcttctgaatggaatctgccaattctccaatctcattttcagatgaaacatccaacgaaacgtccagattgccgtctgccaactcccgtgccacttcgttcaatgcaacaattggttttgtaatgcttgctgacagccgccggattgacaaaatgataataacaataccaacaagtacaagcaataccacgatcactacacactgtatcaggctcgcaaaatattcacttgacggcatacagcttaatgtataataatctgttgttccaattcttccaacatagccgtactttgtgcttccatctgccttatattttacagaggtcgcattctggctctggattgcctgcataacagaatctgaaacattcagttcagaaagattcttcaactgattatcggaatttggatgataaataattgttccatccgatgttaccagaataacaaatccctgatttccgatcttataggctggaagcagttcatcaatatgttctagtgcaatgtcgactcccgcaacaccaatgatgttcttgccactctcatcataaaccggtgttgctgcacttaagatcaggtttccggtactggcatctacataggcacttgtcaaaatcgtactgtttgtctctactgcacgataccaggtacgctctgtgatttcaaaactcttatcacttgtaaaaccgtctgactgtgtcacgacatttgcatcaatatcccccagccaaactgcctgaatattatcgctgtccgccgctgcgatcttctgcaactcgtggaatactgcctgataatcagcagactctataatggaatctcccgctttcgtctctgtcagaagtgtccgcacatctctatctaacgccatctgctctacaatggtcatatactcctgaaaaaagatctccaactgataggatgctgcctttgactgcatctgcagatcattcttctgcgcgcttaagctgatatttccaaccataattgcgaccactattgatacgatcataaaaatagcgatcacaatggtaagaatacggctctgaatttcctgggcaattttcttgttttttgttttcataccccgttctcctcctgtttattaagcttttctctgcatgtaactattttaattgtagcactttcccctttttaaacaatactttttcttaaaaaccaataatttttccaactcatccatttgatttttcactgctccacaaatttgacagtggtttaaacgtataacccattccctcccactttgtgagcagttcatctaatatttttccattggtggaggatgtgttatgtaacaacacaatggctcccggatgaatccgcccgatcagcttctcaaacgcttcgtcctccgtcggctgtgcatccgcattccagtccacataggcgaggctccagaaaaaggtcttataccccaattcttttgccatcgcaagattctctgtactgtatttgccctgcggtggtctgtaatactttgtcatctcctgtccggtcacttcctgaaacaaactgctgaccgcatcgagctctttctgaaacgactctttgtccgagattgccgacatatccggatgatgataggtgtgatttcccaccgtgtgtccctctgtaaccatccgtttgaccaattccggcgcactctccaaaaaatgtcccacgacaaaaaaagttcccggtgcattgtgttttttgagtgcatccagaattgcttctgtattaccattctcatagccgcagtcaaatgtgagatagatcaccttttcctctttacttcctatataataggtatcatactgctttaactcatccgccgtggcatttccggtcggctgcagttcctttccagactcgccaaagccaagtccccagttatcgactgccgcctcgatgtgcatcgtctcctctgtttccctgtcagactgccactttgccacgacagatgcgcttccccagccgaataaaaacatcactgcaaaaagcagcaggctggaacggtattttaataagaatgctttcattttctgctccgcatatcttctctttttatgtatacgaagcaacaggctgtcttattcgttctgcttatagccacagcgtgggcagacacccgcgcctttataaatgtaaccacagcggtaacaacagatcgtatcatgcttttcttttgcaagataagattcttttctggaaaatggtttttcctgcagataacgggtaaaatcttccatcacttttgcaaacttttctaagtctgcatgttctaccgccagaggcagctttgtcctgcttccattgttctgatgcacatagattccccggttcaaaagtcccgttgacgcttccaccgaagcgatatccattacagaaatataataggaagtcatccatgcactgaagtaaagattttccggtgtcagaagaaccccttcttttcccgactcatcttttgacttgtcgatcataagcagcggatattcaaactttccgattccattggcgaaattgtcttctgcgcacgtaaaaactgccgtttcctccggttcagcctgtttctgccacactctttttgccggataaaaatggtatcgttccgactctgtcacccctgcctcatcaaaagcattgaacagtttattgactaaaagttcacattcatcggtcttgatttttgacatacgctgttctaattcttttaacgcatcaaattttaactgtggcagaaagtttccttcctctaacttcttcacagcgtcacttgcatcttcaaaatccatgctgccgacatttttacagatttcttttatctgtttttcgtccatggaacggatacggtcttccacctgtccgatataaggctgaacgatctcaggacttaagttttcctttttaatctcatccagcagcgaaacaaggtcttctcttgttcttcttcccggctggtttacaagccgctgtacttttgtcagacgctttaattcttcctggtgcgattgcctgtccgcttctggatttttcagtacttcaaccggtctgctttttctttcccgaactgtttccggttctctccggcttctttcctgcgtttttgcagttctttctgattcttcgctctctctgtctttgccttctgctgttcttccagtacttctctctctttctacccttgtagtttctttcagttttccaccttcgattttctctgctttttcagcactttcttccgctttttttactgattcttccttacttttttctgttgttccctttgaagctgcttgtcctgcctctattgattttctggtgattcttttttcttctgattctttccagtttttttcaacatctccactcgaagcctcttctgttcttccaacccttctttttttttctatttttgcagccttgcccagttcgccactcttagtttctaccgttcttttcgtttctctttccggtttattccgatttttttctattgcgctgtctgtagttgtttccaattcattgctttccattctctccgattttccagcattttttcctgcactttctgcccctacgactctgcttgcttcggctttcattctttcttctgccgctctgccctctttcgctttttctcctgcttctgtggctcttctttctccggctttcattctttcttccgctgcttttccttccccggcttttctttctacctctgccaatccggttttgtcgtttttcttttcttctcctgctgttttttcttcgccgtctgcatcttctcttactatatccgctgcattgtcttccccttctcccccacgaattgccttctctaaacgccgcacaccctcatccgaataaaatccttcctccattttccgcatggtacggaacaattcctgctcggatacttccggcaaatgcgcgatcagctccgtaatctcagcttcctcatcctgcgaagcggctgtctctgcactttccacctgcatttgcatctttttatccacatactcgttgtactttgtattcacattgcggcctgctgtgcgtcctaaaagttcctgatagtcttcataagccgcctcgtcccgctcaaaatccattttgtatacatcgccatccacgagaaggcgcttcggtcttggagtgtacatacagcagcattttttacaactgtaaacacgcgcaatgcgcactgccccttcctctgtctcaatctgaaattcctttccttccggataaaccgccatgtaaagctggctgccacatttcggacacaaatagcccgccagataaaaattatttccgatacgattgcgtctccgctcggcaatggtcgtatccttcatcaaaaaactgctggctgcctttttccagatcagtttatgccacaatccctgcggttcttcttcctccggaatgagaatttcttccggttcttccgataatactgactcgatgacatcctcataagtcagccggatcttatttttataaaaacggaaatgctcctgaccatactgcgattccacctgaaattccccaagaatctgtgcaaaaagccggttcaactgcacatagtccctatccacgcggagtcctctgatatttccccattttccaaacgcataaagtaccatatttaaaatgtcccgcacattcggatgttcttccactgcaacaaccttctggtcctctgcgctcagttctataatatttgtcacgacgagctttgtatcaaaattaaagaaaagtgaccgcacgcttccctgtaagatcaggtaatctccgatcacaaaaaacatcccgttccactccaccggggcatccatcattttgatcaatttctgaaatgtcagattcaactctttatctgcttttaaaactatcattgtatccctcgtttatctgctgcttaaaaatcgttttcatatgtctattatatttctattcgatcagaacctcaatcaagtttataaactttttatatattctgcaacccccttatttttctgctttttccagtttattgttagcactcatttaaaaagagtgctaattttctattgacttttaaagacaagggttataaaatcctaaatatgggttgattgtaatagtcagtacatttgacagtcgcaattcccagtcacttattgtgatgataaagttaaatcttattagttttacttatgaatagaaaaaggagtgttgtattatggcagagaaacatggaaatctttcaattaacagtgataaccttttcccgatcatcaagaaatggttatattccgatcacgatatcttttatcgtgaattgatcagtaatggctgcgatgccatcacaaaattaaaaaaactggatatgatgggcgagtacgaattacctgctgattacaaggcaaaaatccagattattgtaaacccggacgaaaaaacattaaaattcattgataatggtcttggtatgacagctgatgaagtagatgaatacatcaaccagatcgcattttccggtgctactgatttcatcgaaaaatacaaagacaaggcaaatgacgatcagatcatcggtcatttcggacttggtttctactctgcattcatggttgcggatcaggtgacgatcgatacattatcctataaaaaagatgccacaccagttcactgggcttgtgacggtggaacagaattcgatatgacagacggcacaaaagaaggtgtcggtacagagatcaccttatatctcaacgaggactgtcttgaatttgcaaacgagtatcgtgcaagagaagtcattgagaagtactgctctttcatgcctaccccaatcttcttatctaaggcaaatgctgagacagaatatgaaaccatcgatgcagcagataagttagatactgataccgttgtggaagaaatccacgaggaagcaaaaacagcggaaaaagaaaatgaaaacggtgaaaaagaagtcgttgaagtttcccctgcaaaagaaaaattaaaaattgtaaaacgtccggttccattgaatgataccaacccattgtgggcaaagaatccaaaagactgtaccgacgaagaatacaaggaattttaccgcaaagtattcttagactacaaagagcctctgttctggatccacctgaacatggactatccattcaacttaaaaggaattttatacttcccgaagatcaatacagaatacgattctattgagggaaccattaagttatataacaatcaggtgttcatcgcagataacatcaaagaagtcattcctgaattcttaatgttattaaaaggtgtgatcgactgcccggatcttccactgaacgtatcccgttccgctttgcagaacgatggatttgtaaagaagatctccgaatatatcacaaagaaagttgcagacaaactcatcggcatgtgcaagaccgaaaaggaaagctatgagaaatactgggatgacatcagcccatttatcaaatttggctgcttaaaagatacaaagttctgtgacaagatgaacgactacatcctgttcaaaaacttagatgacaagtatctgactcttcctgaattattagtgaaggaagaagaaaagaaagacgatgcggaggtattagacaaagatggtaatccaattacaaacactggcgatgctgctgcatctgataatactgctgatggcagcgacacttctgctgacagcgaaaaagatgaacgtaaagttatctactatgttaccgataaagtccagcagggtcagtacattaagctcttcaaagaacagaacatgcaggcagtgatcttagatcacaacattgatacctctttcatcacacagttagagcagcgcaatgaaaaatacaaattcatgcgtattgatgcggatgtgacagaatccttaaaggatgagacttctgcagaagatctgaaagcagagacagatgctttgacagaagtattcaaaaaagctctgaacaacgataaactcactgtaaaagtggagaagctgaaaaatgagaacatctcttctatcatcacactttccgaagaaggaagacgtatgcaggatatgatgaagatgtatgccatgaacggtatgggcggcatggacatgaatatgtttgctgctgaccagacacttactttaaatgctaacaacgaacttgtaaaatacattttcgagcacaaagattccgagaacgttccgatgttctgcgagcagttatacgatctggctgtgctctccaaccatccgttatctgtagatgagatgacaaaattcgtggagcgcagcaataaaatcatgatgctgctggcaaaataaatcgaaatataccggagtttaacggacgtagtgtcgcaagattctgcagtgcttttatgggttgtgaggggcagatataagcgccctctcacaagtcgtgatcttatatgtaatgaaaaagaaaaacggtataaacgaaatattatgtttctgttcgccgggcattacgatgggattctaacaatcatgttcagcaaaggcttccatgattgttagaatcccatctccatggctcacaaagaaaataatatttgtttataccgtttttctttcatttacgttatgagtgacttgtgggagaacgcttatacatgcccaatttacgctatgaactgcactgcagaatctgcaatttacgttatagaactcacggttatgggatgagtgcctattgggtaacgacagaaatcaatctgtattcccatcataatttaagttcaacttctttgaatgaattttcatagaataaaatagattttcaaatgcaattatggtagaatcatggtgttaatgagtttgactaatcatatttacatgaacaggtgaatgattgaaattacagaggagaacaaatagatgatttccattgataccaaaagactccatcttcggaatgtattgcaaaatgatgtggatgtaatatttgattatagaaataatgaaatatgtgctcgatatcagagaggacaggtaaaagactatgatggaatcgtaagtttgattgaacgccgaagaaatgatgagatatcaattgattttccttgtatgatagcagtagcactaaaggatacaaatgaaatgattggtgaaatagttgttatgccaaaggatcatacattttctctcggatataccttttcttataaatatcatcgacaaggatatgcttttgaagccttaactgttttgactgaacatcttcacaagatggctccggaatgggagtttattagttttacagaatgtgaaaatatagctagtattgaattgcttaagaaattaggatataagaatcttggctatgttccaagtctggattctcaagcattcggcaaatggactacaatggacacggaggaagaatttgctcatctgagcaaataacttctagttgcctaaacacttattaccacaatacaacagaataaccaatactgcgtcagagtatatagaaaaaaatcagcggcagatacctccacggtcactgccgcaggaaaaggatggataaaactatgaaatttatttcctggaatgtaaacggacttcgtgcctgcatgcaaaagggatttttagattttttcaatgaagtggatgcagattttttctgtgtccaggagacaaaattacagggagggcagattgcccttgatctccccggctaccatcagttctggaattatgccgaaaaaaagggctattccggcactgctatttttacaaaacacgaaccactctctgtctcttatggcatcggcatcccggagcatgaccatgaggggcgtgtcatcacattggaatacgatgctttttatctggttacgtgttacactccgaattcccagaacgaactggcaagacttccttaccgcatgcagtgggaagaagattttcttgcctttctgaaaaggctcgacgaggtaaaacctgtcattgtctgtggagatctgaatgttgcacatgaagaaattgatttgaagaatccaaaaaccaaccgcaaaaatgccggtttttccgatgaagaacgtgcaaagatgaccactctgttaaactccggattcacagatactttccgctatttttatccggataaagagggcatctactcctggtggtcttaccggttcaaggcacgtgagaagaacgctggatggcgtattgactattttatcacttccagatgtctggatgcaaagctgcagtctgccggaatccatacggaagtgtacggctctgaccattgtccggtggaacttattgcagacgcctgatgcagtgataatatgttttttaacgtcgtttctcataagaaaaaaagaaagagcgtaacctcaatgtcatcttaacttaatgacattggtaacccgctctttctttttttctctttcagactttttctatgatccttcactgctatctgtttttcctatatctttttcctgctgcaaatgtcataccgcatcctgcacagagaatggacgtccacgccatccacatggagctgtctcctgtttttggcgatctgcctgtcagagtggtattcacatcctcatataccaaggcataggttgagaaaccatccgttgcaaatgtaaactgattcgtggctgcatcgtaagtcccatcgatcattgctgccacaccatcatggattctgacgatcctgtaaatgcgttcaatactgctgtcatggttcacaaggttctgcggaattgtgatcgctatatacattggcgcggataaatccgtaatctggcgatccgctcttcctgatatcttcaatgttaaattaagatttaagtattgtccgatcacattgtttccaagaacactctggatcaaagcagtctcttcttttgttggtgtcatgccggatgcactcaaaacaaactgcgtcttgttcccagcttttactgccttgttctcgtcttcacttaattttgcaagattcagaagctgatccgctgcatttgcgatattgattgcagggactccctctccgcttactgactgtgcagttatcgcattatctgtagatttcgcagccggagaagcagttgtggaagatgcattggaactgttttccatttttacattaccattatccgctttctttgctgttttcacaataaaataagttgagaactgatttgtctcaaaagtcagcgtaccattttccgacacagacgttgtaagttttgtgaggtttccgttatgctcccttacaacctcatatcctgccaccgtgtcataatcagccacttgtagtttcatttttacaggctggtcgaactgcgtgactggattctcccagttagttccatctcccttgctgacaatctggtctaaagtcaggtttactgcttctgcacttactgcattttctacctgtgcaagtgcatttgttgtatttgcatccgaatcctccacggtaagacgcagatttccacttggagccacatttgctccattttcaacagaagcagaagagacttttgttcctgatgtcttaatttcatcctgtgtctgtgtgaagattcctttaaaatgcacgttggcatccggcattgtgaaagtgaaggttgatacctcatcctgcggtgccaacgtaactcctccattaagtgatacacctttcaactgataaccataatccggtgttaatctgactgtaactttttttccggcatctattgcaatgtgtccacctttctcgtcccccggattatttgcaaacgggatatcatgcaaatcagtgacaccttctatcccgatcacctcagcttttccattttccaaatacgcatcttctccataggtctgactgtcatatgcccatgtaatggtcctcacagaatgatcgatctggatatgctgtgttcccgctgcatttaacgctatcgctgtcttctcagattttcccgcatctccggactttcccggaaattgcagactgtattttgtttcatcacaggaaacataaaattgtatagatgttatgtcagcttcaaacacgtattcttttgtactgttggtacctaaacctgtcaatgggctgaaactgctgccaccatccttgcttacatatatcttcatatttttagaatccatatctgcaaagctgctacaggcatccccctccaattgtaagcgaatcctgttatctgttgactgccccggctgtccttgtgaaccctttttttctacaactaatgtaatagaatctgggaatcctccttcaccctcccgttctgccagtgaagtttcattctgtgttactgtaagctttgtttgaaatccattgtttgaatacacacgaatctgcatattgtctggatcaaagttctcgagtttaaattttacactccctaaatttccctctggtacagaaatcttagaaccgtttaattctgcaccttccaccgttaacgcaacttttgttccctctacatcatacgtgacagtgctgacattcacaataccttcaaaattcaactcaatcgatctgctaccttgtcctccttcaccctctgccgacacgttcatcgccggcaggacaccgaatatcagtaccaatgtcagcaggacactgactgttttcctccacgcctttctcatctgcttttcctcctataatgcattttagtgcaattttattctcccaatttggggactcttctctacatttttccgcttccgccacataccgtacatttcttcgcgccatgacagagaatacaatcatccgtgaccacacccttgccatgacaaatagaacatggctttccatgtgaacctccacagaattcgcagacaatttttcctgtgccgccacaatgtctgcatgccgaaccatccgttgcatccacgccacttcctttgcaccccggacatgtctgcataccagatgtatcacagttgctacaggtttcaatgagactgccatgacagcgtttgcatggcagtgttccaccgccgcattctgcacagatcccggttcctccacatgcactgcatgtctttttccctgaagtccctgttttctgatctgcttcactccccgtatctgtttcactctccggattttcttcactcttcacatttttttcactctctgaagaatctgaaacggtctgtaatactttctccagttttccgctgtctgttgcctcctgcacccaaacaacatctgtcatcacttcattcttcccggtcagatatcctttttcttctgcgacatccacaattgtctccatcccatctgcaagcttctgtcctgtcagatcaactgtttcaaataaatctgccgcatctgcattcaggtattctacataaacaatactttcttcggcatttaaatataagttaaattcaggattaatttttacatggatcacagccacatacatcaaaccatccggtattccaacccttccggctttctccgttgaaaaagtttccaccgtttctgtccccatgactgcttctgcagcacggatttcttcagaactctgttcggtcgatgcgattgactgatcactcacttgttttccacaagaagttacagtaagcatcaccgccagacaaaaaaagactcccagatcacgcaccttatgtctcattcaagtctcctttctccataacaggaatatattggaaaaatcttaacataaaattgcacgatctgggagtttacatatgtctcaatcgtcagaatcagcctttttttccggtttccatgtataataaaactggatcaggccaatccttgaatttgtatctgtttttttgttgagcgatgaaatataccgatataacattgcccttgaaatataaagcttatttgcgatctcctgcacctcatcatccgatgctaaaaacattttcaacacctcctgctcccgttctgtcaatgcataagtatctgcaaattcaggaaaataatcctgctcttcttcctttttccactccttatcaggcaattccacatccgcctgtcccatcaccatgtaaatataaatcgcaatgctgatcagcacaaataacccgatcgatacgatcatgatcttcgtactgtcaccgaagcggatcagcgctacagaaaaagttccaatgagtatggcgcagagattgttcaccgctcttcccatgccagcccaaaactgcggcactctcatataccccgccagccgcacaaaaccggtcgagaaaaacacaacaaagaagcctgccgacagataaaatacgatcagcccaagcaaaaaagagccgccggaaataatcacaagtatacacaccgtagagagcagcgtcacacagtacatgatgtggtttctgtatctgccttttccataatcaaacaacacgcctgatacaagtccgctgaccgccaggatcagtcttggccactgtccgatatccatacttccacctgcatgctctaatgtcactacattgtctaatgttgcaaaaatacaggtcataagggcgactgtaataacgaacataactgccgctgcatacggatgtctgatgggatttgactcatatatgttccgctccatcaagcttccctccaccttccttttctctaccagaaaaagaagtgcccagaatgccacagtcaaaatcactgcttccaccgctgtattatggatcagattgttttcgagaaactgtaaaaaaagtccaagtgcatacgatactcccaccgtttccgccagatgttcttccataccataacggcacgctgcccggtagtgtaccagacttccggctattccaagcatcacatataaaatcagtcctgctgcaagtgtgcttccataactctgatgtacctggattccccacagacatacagccgcaagcaccccggcaccaacactgcctgccctctttgctctttcccgcagtttgccatccagcactccaaacagaaggaagccaactgtgctgactccaagcacataactctgtgccagtaccacaccaccagaatctgtgtggaatgccatcatattatcaaataaatattctgctcctaaaaacacataattaaataatgccagagcagtcataatctcgatccgctctctcttccagaatatatttttcatttattaattctgcctttaatttttataaaatttcctcatcattccgtaccagacttcagataatgactccgccgccggcaatgtaatctccatcataaagtacgactgcctgtcccggtgtcactgcgcgtaccggttcttcaaacacacagtggatctgatcttctccggtacgtgtcactttacacatacttccactgtgggaataacggatttttgcttttaactccatttccccatcaatgtccggaagcgacataaagttcacatgatccgcatatagttctgtcgtaaacacgtcctcatttgaacccagtacgacctcatttgtctccggacgtatctctgtcacaaacacagggtatcccattgcgattccaagaccttttctctgtccgatcgtatagtgtgtgattcctttatgtcttccgagtattttcccatctgcagacacaaaatttccaggtggcggcacaagttttccacactctttatcaataaatcctgcgtaatcgtcatccgggataaaacatatctccatgctgtcttttttgtgtgcgaccatcagcccgatctcctcagcaatctggcggatctcatccttatgataatctccgaccggcatgagtgttctcgacaactgcgcctgcgtcagattgtaaagtgcataagtctggtctttctcggcggtgacagaatttttgatcgcataacggccatttggaagctgttcgacccttgcgtaatgtccggtggcaatgtaatctgcgccgatcgcaagactccggtctaataacgcctcccacttcacatatcggttgcatgcgatacatggatttggagttcttcccttcagatattctgctgtaaaataatccatgacatttttcctgaattcctgcttaaaattcatgacgtaatacggaatttccagacggtctgccactcttcttgcatcatcaacagcgctcagcccacagcagccaccattttgctcctgcgtaaattcgtcctcatcctgccagatctgcatggtgacaccgatcacatcatatccctgcttctttaataaatacgctgcaacggaagaatccacgcctcccgacattcctactactactttttttgccatagtttacctcttttcccgccataaaaaaattatgagaaacccatttttatgagcttctcataacatatcatgtctgtatttattttgcaaccgtttaggttgtggtattataaatctctccggttgtgtaattataagtatacataccggttttattataggtattggctttctctgcctcagtctttgcgtgactctcgatcattcctgcctgaaccgatgtctgataaccgaatccgcctgtcgtatggaacagggattttaccgtgttcatatcggctttcttaaaagctgtctcatcaatggaaagcttattatcggttccaatggtaattcctacagagcctaacatactagaatttgcctttgtcagattgaccatggacttcgtgcttcttaagatgctgttggtattggaatccccaccttcttttagcatcttgttatagctgtccacaaactcactgaccgccttgtaaatcttgtctgtatcatactcataagatacttttccatctttatctgtcgtctgcttctttgtaaaaagagatttatctccgtttgttctcagtgcctcagaggctttcttcaaatcatctgcagcgctctcgatatttgcaagcgtcttagaactgtctttcgatgttgatgtggaagttatggaagacgaagaggaatcgccagaagcttcctttgcataataagccttcatcagctttgtgtaacttccgtttttgatcgtggcataatcggaataattaatgccaagtaaatctgatgttccaaacatagcacttgttttcgtgctgcctgaattcagacttgaaaacagtactccaatggaagatgaatcatatcctgaaattgttgccatatctctcactcctttgattagcaatcatccatgtaaaaacaatttttcctactatttacatcgtcattttagcttcattttataagttttgcaagttcttttctgtagttttgcacaaaagattttatttattcaacaattgttcatactttattcacatattattgttacaataaactcataagtgaaacggaaataagtttttaatacttgataaattttttcataatagcccagatgcctttggtgtctgggcactcctcatttcagaggtcttttcagatggcagaacaccatctgttttttatatattctcaatctgccagtcgatcggctctactccatttgccttcaaaaaatcatttgctttactgaaatgcttacatccaaaaaatccacgatacgcagataatggactcggatgcggcgctgttaagatcaggtgtttcggattcgtcagcatcgggatcttactctgtgcaggtcttccccacagcatgtatacaatcggtctgtcctgggcattcacagcctgaatgatcgcatccgtaaactgttcccagccatgtccctgatgggagtttgcctgatgcgcacgcaccgtaagtactgtatttaacaaaagtacgccctgatctgcccattttttcagatatccattattcgggatataacagccgagatcatcatgcagttccttatagatattctgcaatgaaggcggtatttctttctgttccggtaatacggaaaaagataatccgtgcgcctgatttacattatgatatggatcctgcccaagcaaaagcacttttaccttgcttaacggtgtaaaatgcatcgcattaaaaatatcgtccgccggaggataaatcaccgttttactatattcatcgcggacaaactgatataactctttataatatggctttttgaattcatcctgaatctcatccagccagtcatttgtgatcattgacatcttttgttaccttcttaaaatttctcctgcactgcttcatttgtccggaacatccagtctgctgccggatgtcttagcgccgcaccggaacaccgcggcctgcaagataatctttcagatcagcgatttccagctctttataatggaacagagaagctgctaatgctgcgtctgcttttccttccgtcagtgcatcataaaaatgctcttttgttcctgctccaccagatgcgatcaccggaatggatacattttcagcgatcattctggtcagttccagatcataacctgctttggttccgtcgcagtccatgctcgtcagtaatatttcacctgctccaaggcggtctgccttcattgcccattccacagcatcaattccgacatcaatgcgtccgccatttttataaatattccagccgctgccgtcttctcttcgtcttgcatcaatggctacaaccacacactggctgccgaatttatctgcggcctcactgatcagattctgggtattgatggcagatgagttgatggagatcttatctgctccctcgcggagcaatgccttaaaatcatctaccgtgcggattccaccgcctaccgtaaacggaataaatactttttccgctacttttcgcaccatatccaccacagtctctcttgcatccgaagttgctgtgatatccagaaaaacaagttcatccgctcctgccttatcatacgctgccgcaatctcgaccggatctcctgcatctcttaaattaacgaaattaactccctttaccacgcgtccctgattgacatccagacacggaataattctttttgtaaacatcagcgttcctcctgcaatcctgcaaagttagaaagtatctgtaatcctactgttccacttttttccggatggaactgacatgcaaaaatatttcctttttccacggatgcatgtatgtgcgtgctatactcgatcgttgccttgacaatggactcatcttctgcctttaaataataagaatgtacaaaataaacaaatggattgccctccagattttcaaacagtcgtccattattttgtaaatccagcgaattccagccgatattcggaatctttaatccttcctgctccggaatccgaaggattttgccttctaacaggtgtaacccttccacgccctccgactcttcacttccttcaaacaaaagctgtaatccgagacagattcctaaaaatggtttctgctctgccgccacttcacgaatgaccttgtcaagttcaaacttctttaactggctcatggcatctccgaaagaaccgacacccggaagaattactttgtctgcttttccaatctcatggaaatcgcgtgtgatcacacattcctgtcctaaaaactgcaatgccttctccacactctttaaattgcctgcgtcgtagtcgataatcgctatcattctgtcaaatcctttcaaatcaagcatttctccaatgcttgcgtacatttccaacagttcttgctgtcatttcattacatttttgtgtgtttcgttacatctcattacacactgtaattagcaaataattagtatactaaaattcatactaattagcatttagttgattcgctatcgcattgatttgtgtaagctgttcaactcctggcttaacatccacatagttatccatcgttgtagatatattaccatgtcccaatatgtattgtaatgttttcggtggtaagtattgcatattcgtagcaaatgtatgtctgcaaatatgaggttcaaatttacgaataggattttctggattcgcattattaaaccttttaatacaattctgtagatattcttctacatgacctcttacaatagttcttctgcttctcgttgcaagaaatacaaagccttcatatgcattgccttgttcatcgtaacatacaggttctatatcgcctttcaagtagcgattctcaataatacgctggaaactttcatacacaccatctgtcataggaatagttcttacaccattcgttgtttttgtaggcagtacaacatgagtgtgattgatacattgtaactgtttatcaacggttatcattcgattgtccatatcaatgttatcaagagtaagtccacataattctgacgctcttaatccactccaaaacaatatatataacatatcatagcaatgtgaactatgcgtgtcttttgaacagaaattgagaaatctgttcatgtcttccacagaaagagcttccatcttcttactgtcgctcctgtctgttgtaatgcgtctgaatggattctttgtaacataatcataatctaaagcatactcaaaggttcttttaataagactaatctgtgtctgaattgatgaacctctatactttttcttcatatcagcaagccactcttcacaatgttctggtctgatttttccaatctccatataacccagtttatattgtttcagcgtattcactgtaacattgtaaccaactttagtattgtgtgctaacttctttctgttgtttaaagagttgaggtatctgtctacaacctctaacagagtaagttttgctccatcaatatcaatgttgttttcgagatatgcgttaagctctgcctccttttcacgcaaactctttgttgactttttacctttaggtaattggtctgtcatttcaagcctatatgaactaataaccctttcttttccaaaacaatccttatagtggtattcatacctctttgttttaggattgtaatattcattaggtcttaatgtttttctagcaggcttgtttttttctgacgtagctttatttgccattcttgagcctccttaaatcagagtgcctcgaatgcataccacattgattgtaccacatccaaagcacattgtccatttcttaaatctgttcaacattatctataaatttctcaaattgctttcttttgatcttgatagttctccccagcatcaaatgatatttgtttccataatcttcacgaactatctctctaagtctatgctgtccaattccaaataaatcggacgcttcttttatattcaataaaaccttactatccaatgtaactgctgcactttctataataatcacgctccttaatataaaaggcagaagtcattacaacctctgccctaatcaaaataatatattctgttaccattctcttgataaactgtcagcaagcagatacacaagacctcctgctaatgccatacctaaacatttaaccatttctttctgatatacaggtattgacttttcgataagtcctacatcaataccacagatattttttaatggaatttcaattccacaatcatatttaagtgcatatatcatacatcccatagccttttcaaatggaatattaaactgcttcataagtttttccaagctattccatgtcttttccactttggatttatcatatcccatacctgtaaacatatggatatatgtattcttctttgcttcttcatctgaaatgtcactgtttatatctgtgtctgccaagaagtccttgcacataaactcaatatcatcaaatttaataatctcactcgaatgactccatacagatttagaagtatcgagacaaatgactgtcactggttctgcttcttcattctctttgaactctccgacacaagtaatcgttcctgtgtattccttatccgcagttcgacatattaccttatctccctcgtggaacttatctgtaataccatcccttgtatattcaatatagtgttttgctgtaattttatccataattttatacctcatcttctttctgttcacagaatgcttttaataatctcttgtcatagaaatgtctatgaattttcttacaaattcctacaataatgcctacaaccatatcaagtacattgattgtaataaacatagcaactgaacccaaaataagtatcacaatagccttgataaagctaaaaggttctgtccacatactgtaattgcagattgtaagcactaccgctagaatcttactaatactccaatatttacttaaaatattttctaatttcatgtttctatctccttcccttacgctttccacaaatattcatgtttctgaatacaccacaaggaattttagcacccactttgaccaatttttaagtccacgcccaacgcattaggtacgtcatataattgattcatatacacaatcttgtatgtgctatttgtgtttacttcgcatattctggatttgaatattttgtcgtattgtttttccatttttatttgcaattaaaattgtatcatcggaaactgatatgtccacatcatacgtgtctattcgtttttgaggtatcggcataatgtctcctttctcacagtttagcgataatcaattttctctgttgattcccgtttatataatgaactaaacatttatcaccagatttaaaattaatgtttgttccattttttacattgtacttatatgaatcaattaacacagtataagaatcttcattttgagagactataattgcctctttatctgaatataaatgggcaattttcttatctactatgcgaataacattttcatatattttttcaatagctttatatccattattcataataatattaaaataatataggggtgttttaccaccccaatattatttatctccttctttttgaaagttgttggtcaacaataccattgctatattttaaaatgtcacctgcaaattgttctggcttttctacattcggtaaaataactttaccaatggaaatagaattagatgtattctgattgttattcaccaatttactataatcagtttgtttcggctgataatgctgaataggaatagagtttatcgcatctccaatatttaacttcgccatcatttgtgcaaaattatcatagacaggaataggtgtaagcaccgtaccatctggcagaactttagtaccttgcaactgttcaacattaccttggttctttagaatttccttagtctcatttgcaggaataactgtttctccaccttcaaaattatataactgttcaccttttgcaagttcaatttcaccattgtttttaacaataagttcaggattctcttcagaaacaatattccatccttttttcgcattatccgtaccttttgcatatttgtatactcgataaccgccagatactttatcgtaaccaacgcctccaagcattccaacttgactagatgcttgtcctgaagttttatacacttgtccaatgtactttttctctttctttttagcaaaatagatgatgatattattttgaattgtacgagacacaccaatatagttgtttctagtaatccaatttcttaaatcagtttcacttgaaccttcatatattacttttacagttccagctaaacgtacttgatatttctgtgcagctgttaagccacttccaccagaagtatttcctccaacagaagtagtagttccactagaaccagaataaccattagaaccaccggaagtctgtgcttttgttgcctcggctgctttgacagcatttagtgcagatatttgagcattcgcagattgccatgccatatcagaaattgacttttggatatcattatactgatttctgaaattattcaatgttgaaagacgaccattaagaacatctgcttcccaactctgaccaagtaacatttttgcgtacatgtcgtccacactgttactatattcatcagaaagagatgaccactgttctttgagtttggtataatattctactttttcttcatatgacttaatgagttcttcattgtcgttaagctgagattgaatcttgaggtatttgtttttaaagttttcaatgtcagaagttctatttaaaagaataagtttttcgtattcctgtccccaaagttcaatagcaagttgttcgcttacagctttgtcccaagcatcaggaatttcattccacttttctttatacttctccaaaatatcaatagattcttgaattttatcttgttctttttgaagactgttaattaattcttcgtttgtaatatcatcaaggtctttctgtgcatcacgaatagcttcattatcagtatcgtatatatatcccttgccttctacatataacttgcgagtacgttgctgttgtgctttctgcaaggcataaagtgcttgttcttttctatattgtaagtctaaagcatcatttttatcgtttaaagcatctatttggtcttgcaataaatccttttgctcattcaatctgtctatttctttattataaacatttgatacagcagataaaattttatcataattgtctttctgttcatttaaggcatcattttgatcattgagtgcatctatttttgcttgccaagcatcaatttctttctgcaatcttcttgtaatagcagataaagcacggtcatatgcatctttctgtttttctaacattgtcttggtataatcataccaatctttgtcggagattttaccagagttatgcatgtctgcaagcatcttagaaacggaatcacagtattccttataggacattttgtttgcatccagtttcttatcataatagtccatcatatcatcacaatatgacttataatatgatttcagacctttgtaaacttcttcctcatacttgcgataatcgtcaaggtattcttctttacctgcaaaatacttctcatttaatgcttgtacaccattgtagtatagttcctctgtgatgtactccatttcgagattgtgtttgagaaggtcatattcggcttcgaaggcttctttggttgcatcggtggaagactttgaagaaccagaacctgattttgaagaagaggactttttagcaacttttgcaaaattcccagcagagatagcattcttagttgactgtatcagctttagtttagtatcaagacctttcataacattttcagttgctgttttatcttttgctgatgcagcagaaatctgagcagataattcctgtgcctgtgctgctgtcatagctgcctgtgcaacaccttcatatgaaccacttaattgagccaaactatccataagagcagcgttaccggtgatgtaatttgcagttgactgtgctgcttcgccattggcaatagcttgtagctctgtcatagcttgagtaacagcagtagcctgtgcttcatcaagcttcgcttgtgctaactgtgccattgcgtctgcattaagagaaagctgcccattctctacttgcaaacaagcaagatattcatcgctaagagagagcagtgattgaatcgtgtcaattgatagctgaccaccattagagttgtattcctctacagcagagtttaaggtgtcatatgctgactgaatagagtctattactgagttgaggtcggaaagtttttcttttaactcatctgtggataggacagaaggttcattcaacaattcatctactttatcaagttcgttctccagcggaacgctatagaatccttgaaactgcggaacagtcgataaataattgttgattgcatctgtaatctccttttcgtttccaataaattttttacttgcaattgatgtgtctatcagttcctgtctaaatgtttcaaattctttttctgttttaggtatttcattaccctgtaacaatgtaattgtctgttgctctgcaacattcttattcaaattagaaatagcatcattgtaaccatttacaaattcttccatttcttttgctctgtcataaatctgactgaatactggattttttgttaattcagtttcggtaaattgacctgattctctcaatgctgccatagcatcttcaagcttctgataattttctaaaatgccatcaactgtttcatcatcaccagttaaaacaaaagctcctccaccagtaccatatgaacccttgctaatcaaattagctttctctaatacctcatatgcttttactgcatcattaccaccagatgataagaggtttctgtctgttaagctataccaatgttcataacctttaccaatatcctttaattcttcttctgctgcttttacaccagcgataaggtcgttttcttgatctcctaactcttgaagtgtaatgttccttaaagcattatccaatgagccatatttagaaatcaaatcatctacactctgaccttcaattccaagtttcttaataagttcgtcctgtactgacatcaaatcttcttttgatgcagaatcagtcttaaccgcttctgataactgaatatatttgtttgctaagtcagataattccgtactcagtgtattggctgcatctgctgcttctttagctttctgtcttgcttcttctactacttgattatgcttagatactgctgaagttactgcactaactccaagactaatacccatcaacacaattcctgctggattattaagaaatacactttttatagtcgccccaagtccagtcatagctgccttgagtgaaaacgtactcgctgtactgactgtattggctgcggtctgtgcattagttgcttgcgttaaattcatttcagcaagtttctgtaatgccatttcttttgtcatgccttgcatctgtaagattcttacacgatcagcttgagtgagtgtgtttgttgccaatacgtttctcaactgttcggttgtcaatgaacttgttgcctgtgcaatactctttaatgcctggtatctagcagataagttaccattcggaacattgcttgccatctgtaaggcttttccatattgttctacttgttttgtagctgtaatgagtgccataccaccagtagcaataaacttaccaagattgagtgcaattataccttttagcgtaccttctacgattccccagttattggcaaattccaaaactgccgaacctaagttagcaaggtcacgtactgtattaccattgataataccttgatatgtctctgtaagagtgttggaaaacctctgacatgctgcgtcagcacttgtcatccaaacctgatattcttctgtagcactccctgcactatttattgcatcttcataagccgatgcagattccttcattccagataatatcgctgcgcccgctgccgagcggctcttgccgaacatagtctcaagaacatttgcacgtgaggtatcatccaacttatccataacctgtgaaatctcgtataactggtcataataggatttgaatgtatgctcatcttccataatatcaacacctgttaatgccctgagtttttcacgcaagttacttgtggctgttgctaaatcgtcaacttcttcgcccatttcctgtaattcttcgatagcgtctgtgtcaccagaagaagctctcattcttaatgaaccaatcttagcggtatttccaagatatgacggatcattatagtatttatttgcagtagcaaacattgtagctgcttgttcaatactcgtatgtgcttctgtcaatgttccagcacttaatctgatactctctgccaatccctctgcatcaatactatatttgttcgacatattattgatgaggtctgtataagcttcaagtttcttgtccatctggtcgtctgtataaccaccaatttcatcaaatgaagcaatagaagtcttaattgaaccgatagcagtatcaatatctacatctccaacattggctaagatattcgcccacttcgaaccaagttcagcattatccaacgaccaaccaagttttttgaactctgttactgcatcaatcaatgaacctacttttacattcagctcttgtgctttttttaatgatttatcaaaatatttgtataatgcgtctctatcagctatttcatctgttaccttttgaaaatttacgagactatcatctaatgtttttgcttctgtagtagcatttttgacttgattagatagtgcataaatcatacttgcaccactaaagaattttgcataactcttaatagattctttgaatttacttccccaagtcatacctgcattattcgttgctacaagctccgtcttaaatgctgataactcacctctaagagtttttaattcgcttgtactctttgctacatttgcagaattaagcaactgattaaactttgttgtcatctctcgatcattgaaaagtttattattattccttcccaaaatcttaatctggttaatcaactgttgcttgcttgtgtcaaaattaagatgaaccttattattgttggcaaccctttgtgcattattaattgcctgtctggttgctgtctgcacaccttttgtgtttatactaggtgtaatgttaaaagtcatattgtttaatccttttaactgcgtcttgatagcttttatcgttttttgcatatcaagattgcctatcagcttgacatgtgataaatctccaagatttttaatgtcagcttttatttgttgtttacttttcgtcttatgtaaagacgctattatctttaatataaattcattcaattttatttcccttcccaagaatatttctcgtatttgatacattagtaattaatttttgtgagattttggattgaacaatccgaatagatttttaattatgaatttgtaagatagttttctaattttgaaaataaatctggataaagattgatttttccaagtttgaatcttgaaagtacgtctttgtcaatacctgttatattggcaatatatatttgtttttccctctgtgcccgttcttttaacaaatcacgtaattcttcttgtgtcataataacctccttttctatttttgtagacaaaaaagaccagtgtaattaacactggacgctttaaacgaattatatatatgttatgagttaagaggactaaattaggtagtgtttggacagacctagtttgaagtcagtctgtcctttcaaccatttatcattgttttgaatacacttggtactctactgatatactgctgttcgaggacaatatatcatcaatatataataaaaattactacttgcttaaggtagcaatcattattatcatggcacgaacccaaggctcatgccatctagtatgatatccaaatatataataatatctctatgagataattattatcgagtgtggggagatccccactaatagtgaaatcctatagaggtatcttataggagatatgaagtttcccacacactactcagcctacggtcttttcatgcgcagtactttcttcataaggagatattgaaaacgcttgattttcttatgttttatgatatttttacaaaaaataaggtgttttttgtcactttttcacaaagcatttcataaatttatcataattgtttctataaaggaaatttaaaattgcattacatacatctgaattatcattcctaaaagcatacctaactaataacataactgtttcttggtctaaattattatttgtagagtttaaaaagcgattcatacaatccagttttatatccatataaattttatcagaatattgattgctatgttgttcgatatattttatggattcattatatttctccgctgattgtataaatttattccatttatatttattgccttttcctttaatatctctatttataaattgtgatataggaagtcttgttactcccattgctcgtccaacaacattattatctatacttcttgccattatatccataggacaattcattgatcgaattttatcttcatcaaaaactttgttgtttcgacttttctttgtatttgcaaaaaattcaggaatacttttgtttttcatacatggcaaccttttaattcgattaatttcacttaccacgtctatgtcaaactcttttttggcaagatcaatactaatttgaccaattacagacaatattacaaaacatttttttaattcttctccatcagctcctttatccataccttcatcataataataactcaaggctagttgtgctgtatctgtagaagccccaatagattgttgtgcggctgcaatttgattatccatttgtgcaaaatcttctaatttaaaatggtatgaactattacctttttctgccacattattaatgattgtcggataatttatataggcttttctcgcaagctccgcaaggtctggttgatttgttgtataaacaaaatcggtgtcttcatccattccggaggctctagcttgtacatccgttccaatcatatttattacaattacatttcgccctaaatttgcaaagtatttggaaaatttgtctgaatagacattgtgaaaatgtagaatattattcggagaattatgaggactcctaaaagcggctaatttttccccgtctttaaacctagctgtataacattggattgcatcctcttctatatcaaaaatattttcctctattggatttccacctactgctttcagaagtaatgcaataggatttcccataactgtaaggttatctccattctgtagcaatcttccctgcttaaaatattcattttttagtttacttatatccttagtctttttatccctaaaaaatgctgtctttctaaaatcgggattccatttgactaatgccaacattacttcgttaatattaaaattattttttcttaggttaagatattgtaaatatgcggtatctgttgttttcttcaagtctttaaggtagtttaccgaactttctgcaatatgagaaagtatttcctcatctgttgtcggaagtgagttgttcatctgataagccatcaactgcatatcaccccatttactaggatgtgctgtctttacaatctcaaaccaataatcttgcgatttcatataattcttgtagaacttaaaggcttctttaggtgtaccgcccatcatatcaacaaacttcaaccactttagagatttgtcagtgattactacatcaatgtttgataaactaagttttcttccaaataaatcaattttttctgtagtaaaattatcgtaatctatattgttttctgcacagtaatctttgaaaaagtcttggatgtttccacggaacaaacaactcttgaaaaagtgtgaccgacaatatataaaaccattcatatttttagggaaaattgattcgtcaattaagcccatgccatcccacattatattttttacttgttcatctgaaacatactgtgcttcacactcctgtctaatttcctctctctttgttatttctgaatgaccataacttccgttccatctaattccgttgtctttgaatgcttgttttgtcttttctatgtatttgagattagatttttttgatttttcttcatcgaacgtaaacccttttttattaataagttcttcaatatgtgaatcgtcaaaatgaataaaaaactctttttcctcatatgtatatggcacagatttattacttacaattacagccttttgtggcttggaataaacttcctcatctggaacaacaagtattctattccaagggatccttatataaccattggcagatgctgttgttaatgtaagatatgctgataattcgactatcttaaatattttatctggattctgttttgattgctcatccattatgtcgtataaacccatagtcaaaaaatttatagctttatgatacagattatctctaataaatacacattctccatcttttgctttaccaggggagcgcataagcatcttataatgtattggatgacatctttcaccttcctttgcctgtttcctcttctttgtgtccttgacctcagaagtaaatgtcactccattcgtatagtaatatgttcttaaatcgtctttctttatcttttggggttctccaccattaattttatattcagcatcataatcaaactttaatataataaagtccttgctaaatttaccatcaattcttgtaatactttcatccataaatctaagaaataaactatctgcaagtactgcttttctagtagataccctattcaattctacccatttatcttttatcttgtgagttacaatcccctcattttttaacgcatcaatatacacttgatttgcttgcattgactctatgtacactggctttaattcttttgtatagtttatagtcttctttcctataataacacacctctctattctactaagttatgtttacaaactgttctctacttattatattctccgctaaggaagaaacttttttgattattctattgttatctgaaccattatggatagttgcgtgaattacgcttgaataagaattacacaagcatagaaaacttatgtagcgacctgtgaaaagtaaaaataccaaccatcgaatattgacagttggtatcttcattattaatttaacatttcttccaaggctgtttctaatactgctattacaaaagagcacctaaaactatcacctgcaaataatttaataattttacttattacatcagctttctctattccagtatcagtatcagaatatagacatttcaatttgaataaaatatatttaatttctgttctttctgccgtcttagcaatatttacacactcagtaaaaatttctaaagaaatatgctccttattcttgtcataaatttctgctaattgtttatataatttgctatcgtcttttagtgctgccatagttttccctccactaaaattttatattctatatcgtcatatattaaaattagtttataccaacctttaaaaaattcagctatccaaccgccaatattcaattttcaatgtacatttaccacctaatatgaaagtctgatttcattggcaattttgacctctgaaacaccctatttacaagggtttcagcaattgcaattttcaaaattgagcattttacttcacaatctgcataaatgaaggcttattgctcaattttgcaatctcgccactctgattatcaatcaacagaccattttctttgtctatagtgtaagtaccgattccgttatcttcacagaatttttcacccataccaacacctgtctgctgtttgtacattgcactcatgcagctcatatagaacactgtaaattctctcaaatctttgttcatgtaatcccacatcaaatcgaatacaccatcacgaccaaccgcattgtcaagaccttttcacgcaatatttccattatttacgcaatcttcttatttcttgcaccataaactaatgcatccgcttttccttccacgcaatcagcagttacaacaactctctttgccattgccatatcaggaacatcgaacattaccttctgcatagcattttcaataatacttctaagacctcttgctcctgttttcttcttaatagccatttctgcaatctttttcaatgcttcatcctcaaattccagctttacaccatccattgacagcaattcttgatactgctttgtaatagcgttctttggctctgtgagaatatgtaccaaatcatcctctgatagcggattaagtgttgtaataataggaagtctgcctataagctctggcataagtccatatttcacaagatcgtgctgctcaacctttgacaaatcggcaactgattcctttttatcggcaacattagcaccaaatccgatgctgttatgcgtctcttcctttccgatgattttatcaattccgtcaaaagctccaccacagataaaaagtatgttagatgtatctatctttattgtctctccctgtggatgttttctaccgcctgttactggcacttctgatactgtaccttcaataattttaagaagtgcttgctgtactccctcaccagatacatcccttgtaattgacatattttcgcctttacgagaaatcttatctatctcatcaatatagataattcctctttgtgctgattcaatgtcataatttgcattctgtaagagtgttcttaacatgacctctacatcgtcaccaacataaccagcttcagtaagtgttgtagcgtctgcaatagcaaatggaacacccaaaaattttgcaaggctctgtgcaagatatgtcttaccactgccggttgaaccaatcataaggatgttagatttctgaatttctacatctgatttatggttctgtttcaatctcttataatgattgtagactgcaactgcaagcgttctctttgcttcatcctgtccgataacatactgatccaaatgtgctttaatttgtgatggtgtagcaagccgcatattatctgtgacagattcctcttcttcatcgttgagcaatccgcttgcaatagaaatacagctatcacagatgtaaccatattttcctttaatcagcttgtctacctcgtcttttttgcttccacacatacaacaaaattcgttatttttatttgccattataaggtctccttccatcaagtgaaaaattgtaaacttattattcagataaatagagggtgcttatttcggatgccgataggcagccgacatactctctttttatcgaaaagaataatcagtttaattctattttgaaccattcaaggtacactcaaattaagtatctctattagatatattctctcgttgaaagatttgtgtagccatagcggaacaaatctttttgtgctgtaaagcacccactattcaagaaagtaacatccattagtaataattcctcttatctggtcacatactgcattggtaggaatatttttatccttcacactctgcaatgcagttttaatatcatccaatgacattctgtattctttcataagaacatcaataaacggttgtctgtattcagtcagcttatctagttccaacttatgattgttataattggatgctctgtactgcttttccttataagcaagttcattgattttcttctcatgttttgctatgcaatttaatatgtactcttttgtaagagtatttgtattcaatttatcttccattttcaatctataacttctatccatgtcttatctccttaatgggtgtctgcgtggcaaccacaaatgatatttgttccgttccttgcgtcactacacaaaatcattgattgtcgtatattttctatgtcttttaaaaagttgacactttaaatttgtaataggacgatattcaaaaacacccccatttaaaaacaccaactaggtatatgtaatatatattagagtgactaaatgggggtgtaaattattccactcctaaatttgcaaatatctcatctaattctttgtcatattgttttcttttttctgcctgttctttttcatatttaatggataaaaacttttgggataattttctttgaatatcaacatagtattttggatatgtaaatatctcctctacatctttcaacgctggaactttgccccaattatcttctttccagtttttcacatattcgtcatattcaatcaatgcttttttcatcctattatcagaaacagtctgagcatttttatctattgatcctataaccaattcattcagatacaacatctgtaactcatattcattttttgtaatggcttcttgtatgtcatcctcattgaaaataatttttattctttcatacttgcgttcccatctatacatatcaaacaatatttcattgactttgctgtaaaattcatttaatcgcatagtgcaagctacatgatttttactttccaatcccatattattcagcacttttctttcaactgctaatattcttctaatttcatcatcatctgcaacataatgtctgcttaatgtatttttcttatctgtacttggaacaacaatcattgtctgaatctggtaatctatcagacttctattgctaagattatttagagctgtgaataaaatagaattgagcctagaattacatctcatatagaagttgtttaattgccattttgttacattgctgtattcaacttctacttgtaatgcatgaagtggaatttttttataattactatttatcatgcctaaaatactccacaactgatttctggttgcatagcatatttgtccttttttataatacatatactttagaagaatagtctcaatatatttcagatagatatttctattaccagcttttcttttatcatcagcaggaagtggttcatcataaacatctaaaatcacaatacttcttcctcttcccttttccatactgaaatatcttgcccatcttttttgttgtgccttatgcgaattattaccagattttaatggtttctcatgaagtaattcgcataattctttgtagttttttactaccattccgacttgaagatttgttgtatctacttcatagcacgtattttgtacagatggtatagctttcaattctctgtaccaatccatttttaattcttcaagagatttaacccatacatttttcaactgttccttattctgaggcttgttgttttggcttaaaatatcggcaatatttatagcaataattttatcaagcataggatctatgtcgcacgcatactgttttaagacactttcttctatatccatatccttatatttatcagcattcaggataatctcttttgcatatgtgactactctatttgcatcttccttcacttcatcaagtgttggtaattttgttattctttctgcttcatctggtataacagatatgtactctcttccatttgaaacataaaagaatctttccaataccttcgctgtttgatttttattacatggatttatacaatccatatagtctgttctttcttctgtgataataattcatttctccaatcattctacttaatataggcataatgccatttctgacactatgcctgtgattccgtactctgtaataaccaacatcttcattggtatgttgttccgttcaatatgtagtaatcagcatcttcactgataatcaaaggagttattatgtgcttctaaaccaagtgatttagtgcgtaaccaatctcgtcattggcagacttgctactctcaccgcaaatatatctctgtagtataatattctccatatgaagaatgatttttactgttctgattcagatacgacagtaacattgatcgcctgtcttcctttttcagtatcaatcacatcaaacacgacattttcatcttctgataacgacttaaatttctctgttgtgttaatgcccgaataatgtacaaatacgtctgtaccatcatccattgtcaaaaatccgtaacccttctgattgttaaaccattttactgttcctttgttcattttttttaatcctccgtattttctataaaatttcatgtattggattgattgcacatttttctgtgaagtcatcaatcagtcttctgttgtataaggcaggaatgagaatgtatctcgtaatttcctttaacattcaaactgaatgacctctaatatattgttctctcatttaaaatctaagatgaatcatttcaccatttgtaaatgtaattgtataatcacgcaatcccatctctggaactaaatctgcatttgtcattgtaatactcttaatatcattgttagatatatccactcttgacttgtcagcataacgagtaactatcggagtagtaattgctgtcatcagttcatctttctcatcttgtgataattcagaccatttcttagcagccaacgaaagaatttcctcagttttcatttcatcattgataccatacttttctaatgccttccacgcatcttcattttccgtatcataataatattcattatctaaagtcagctttgcttttccatccccaaattccgtaatatcataatggttaaagaaaacttcccagtatgtttccttgctaaattgctgcaccctaatgtcaaattctgaatctttgatgttgtataaataaagttgacaccttattctcaaggaattcatgtataataaaagagaataaggaggaactctcaatgtcacgaacccaacgtaaatacgaccaggaatataagatccaggctgtcaaacttgccaaagaaatcggcggtgctaaggcagccaaagaattaggtatcccagaaggaaccatccacacatggctgaaagcagttagagcaggcacattggatattggcgacggtgcacatactccggaaagcgcgatgagtcttgctgaggagcttgccatgctccgcaaacgcgttaaagatcaggacaaagaaatccggcgtctgaaagaggaaaatgaatttctcgaggaagcaagcgcttttttcgcagccagccgtcggaagtcagcaagaaccaaagaatgatgttcattgccataaaaacgaaagacggcgtgattaagggaaaactctcattctattgccggatgcttggcgtcagccgccagggtttctacaaatatcttgctattaaagatcgcccttggaaatatcaggatcttgctgatgccatgagagtgatccatgctgaggatgaatgcaatgatacctatggacgtattcgcatgtaccaagcactgctccttaagaatccgacgggaatcaagatccccagtgaacgaaccgtttacagggttatggatgaaataggacttgtccatcggccaaagcgcaagccaaatggcattaccaaggctgatcgggaagcacgtaagtcagatgatcttctgaagagagagttcaaggctgataagccacttgaaaaatgcgtaactgatatcacagaaatcaaggcaaaagatggaaaactgtatgtttcagccatcttcgactgctttgattccagcgttctgggactggcaatggaaacaaacatgaaggcaactctgtgtgagcatacactggataatgcctatctggcgcatcctgatctgcgaggtgccattgtgcactccgacagaggaagacaatataccagtgaaacctaccgtcaggcgctttctaaatatggcattatacaaagcatgaacagtgatggtggcaggtgccacgataatgctcgatgtgaaagcatgtgggccagaatgaaaagcgagcttctctatgaccgctacaatacggaaagcctgaccacggatgagctgagagttcttatttggagatatttcatcagttactggaacaacaggaggatctgctctgccaacggtgggcttcctcctatgattaagcgtcagagatactaccaatctctgggcctggctgcataggaaatgatatctttgagataaatgtgtcaaccaatattgacaatatcataattttaaatgcctttatatgaacacttaaagtgcagaaaaacaagcaatttcataaatgttattattttgagcgcaaatgtaaagcaatgttgatagaaaaaattgtttattttatttaaaattgctcttaaaggaggacacaaaatggaaattggaaataaaatcaaccaattaaggaaactttcgggaatgacacaagaacaattagcagaaaaacttaacgtatccagacagactatttccaaatgggagtcagatagcacttcccctgatttagaaagtatcgttaaaataagcagaatttttcatgtgtcattagatgatttgctaaaggaaggagaagcaggtgtggcaaacaaaactgatgagcaaataactttagaagatttgatgaaaataaatcttcataacagaaaaatgacgctgttgctaattagtggtctgatttttattatggttagcatattaaatttcgcctatgtaattgcgctacaaagcacaacacttagtacccagtatatgctataccgatatatcgttacaggacaatacgaaaatgcccctattgattatatgcggttaatgataccgtctattattgcggcagcaatcggagtgatattgttcataagttataccattgaaagaagaaaaaaaggagactgaaaatatgtataaggcaaagatgtttatttcatatatggctttatgtgtgttaatcttttctttatgtgcatgtggagaaaaaggtagtgaaaacgctgctatttatggagaaaccgtcggaggattggaagataatgagctttttgcaattattgatacaaatgcttctttacctgttttacttgttacctcacaagtatataatgacggtttgggaaatcaggcagcacttaattgtgatgtatattatttgatagataaagaagttaaaaacataggaacaatagaaagtatgggaacagcatatcctatcgcctatgatgaaacaggtatttatgctgcttccggtcacgatatgcagcgttttgaaattgaaaaatccggttcgctcagactggcagaggggatttatgagcaatttgacgaaagtggaaatgctgcttataccatgaaaaaaggagaggaaacagatgtaattacagaagaagaatactatgcagcttttgaaaaatacagcaatgctaccatagtaaatttctcttatggtgcatcggacgctggcaaggcagaagtggtaactaacaatgagctggaaccccgtcaaggaaatatagcagaagatgtcaatgtactagaaattgtacaagagacagcctcggaatttgcagtcaaaaaaatggaaacttcttatttttgaaaggcaggacaatgaaattttttatgccgctactttggtagaaaatgattgtgcgccggagatgatatttttacaaacgacttacagacaacacttaaagaatagcaaacccagtcgagccagtcaacggcaagatgaacggctcttgcagagccgccgttgacagccccgcccggttttgcagttaggcagtcaaggagcgacagcctaaagtgctgccgccccttacttttatgatacagcatcaactttggaagtatatcctgatgctgtatcagaggaacacagtacacaagtgagttatatcgtaaagcaatcagcaaatatggcattctccaaagcatgaacagtgctggcggcagatgccacgacaatgccagatgcgaaagcatgtgggcaagattcaaagaagaattactttatggacgttatgataccacttcaatgacagtagaacagttaaaaacactcatctggagatatttcatcagctattggaataaccgaagaatctgctctgctaatggtggcttacctccgatgattaagcgtcaacaatactacgattcattacaggaggcagcataggtcgaacatccttgagaaaaaagtgtaaaccaatattgacaatatcagttattaaagaatgaccaaataatagcaaaaaatgtcgtttggcgcagaacgtattgaaatcatgacaacataagagataatgaagttgtcattgatttcacgaggatttagtagtagaagggagaattgcttatatgagaaaaataaaaaaaatttttgccgcaagcacaatggctgctatgttgatgttgccaacatatggggcaatggcatccagtgtttcatttgctaactttacatttacaactataccatatgcagaaaaatgggaaagagtgacttcaaaagcgaaagttgacaatgaacagaattggtatcttactttaacacaaaagagtgagttggattcaaaagaagtaagggctttggctatatcaaatgatgttgatccggcaatgcaaggactcaatccatatccactgaaatcgacaacgacgtcgagtggagctataaaatatcaaaaacaagttacaaagaataggacatattctctttatgtcagtggaaatgaaaacgtaagtaaacctcataaaattgtaatttcgggaagatatacgtcatagtaaaaacaccggagtctgattggctccggtgtgaaaaaggagatttatgaaaaagaaagtgcttataaaatggatcattggctgtgtaatgctctgcatgatgttacttgtattatggaaaaggacgcatataaattatgatgagtattcagataaaacttctgatatgcagcatgaagaggtagaagaaatcagctttccggatcatatcaatgaaaaagtgagcgatggtcttatgtttgatgcagaggtcgtaataggagaaaattttgatcctgataatttttatgtgagtacggcaaagattatgaaaccggatgaagaaaaatggaagcagttttttggggtagataatacgtgggattataatgtttatgaaacagaaagccgtataggggataaaatcgaatttcagacgtatacagataaacaggaaaatactttgtatttaacatcagaggaagcattgtgggcaaagcaggatatggtatttatttataatgttctggatacaaatgagtatagtccacaaaataatggaaagcttttttctgaaaagatggatctctcttttgaaagcagacaagataatttacgttccgttttagataaaatgcagcaaataggaatagatgcagcggagctggaagttcaccaggaatatgatttaaatgtagataagttaaaggaacaggaagaaaaaaagattgaagcaggggacatagaacaaagtgagaaaaaagagtcatggtcaacttcggatgaggcatattattattatctggacgaaacgacacagggacttccagttttttctaaaagaagtgtaaatgattattcaggggatgaacgatcacagattattgtgtgtgctggaaatgatggaatacgttatctgtatatgaaatggttttttttatttgatataggggatgacaaggtaaaatttgcaccaattgacaacattaaagaatgcatcaaaacaaaatatggaaaaacgttagatgagaactgcattactgtaaaaaaaatggtattgggagtctatccattcgcaactgataaggagaaaaatgcagttgttccggtctggatatgttttttagagcgaaaaacaaaaggcagtgagtatgtagaaaaattatatgttccgattaatgcgattacaggagaggaattttacgatatggaggggtaatgtgaagtcatatttgaaaatggatttttatcgtatgttaacatcgaagtattttggaattggaatattaggtgttgttggtgtatatggactttcactggtgcagttaaaaagtcaggatgtatatttgctaaattattacattaaattctatagtacatatatgcttttgctgatatttggcgctgttgcatattctaatgccatgatggaggatttggagtataaaaactactatttgcagatacaaaagggaagttttggaaaatatatttggtctaaagtaattacggcatttacttcagccgttatcgtgatggtacttggaacatccattttttgtttaatggctcattttaaaatgccgctcttgtccccggataatgatatgctggaatatcttgctgatggtgattatctgagtcagcttattacgccagaaacaatattttggtatctgatagcggatgcggcaatgacagggctaatggctggcattttttctgtattcgctatgtggttgtctttattcgtaaaaaatcaaatgtttacagttatggttcctatagtagggttttacttttttgtcaattattttacaagaatatttggagagaatgattattttaagttgaatgtgatctatatatcaaatggaaaaatatttgaaaaatcctttagttgtttttgctatgcactgttcgtcgcagttgcaattgcagcaataacaggaaagttaatatatagtaaaatgcaaaatgatatatggggtgacaggaatgtggggagcaaataaattaggtattataaaatatagaataaaaaatgtaaaaatatttttgattgccattatctggttgtttatattggatgtatatttggctgattacagatcaatggcaatgacattagggttaaaagatagttttgcaatattgccacatgtccagaatgatttttattttaacaaaattatgttgcttggtggcatgatttttttcgcagatattccctttatgtcaggagaagaactttatgtagtgcttaagattggaaaagaaaagtggtcacagattaattgctgttatatcgtcttgagtggtgtattactaagcacattgcttacggggcttagcttgttgacaattttacctgcaattagtttaaaaaatgaatggggaacattgtatcagacatttgctttttcaggaacggcaggttgtgtgcttataaatgcaagtgcaatgagttattattcaccctatgcgttaatgctgaatatttttctgattgatgcgttaacctttgcattcatgggaatgctgctatatacattgagtttatttgtgtcaaaaatatggtcatatgtcattgttgttgttttaatttttttgcaatctgtttttggaaaaatggggttagtgttggataatttcttgccgttttcatggatatctgcttcgcattggagatttggatatgacaggcacagaccggaccttatttacatttacacggcgttttgtatgttattatttctactggctgtaatcagtgaatggaaaataaaaagaatggactgggtgagtaaggaggaacatagatgacagatgatgttgtaatacaagttaataatgtgtcaaagaaatttaaatcacaagttgtgctcaaagatatcacattgcaatgcagaaaaggcaggatttatggatttgtaggatacaatggatctgggaaaacagttctttttaaatgtatatgtgggttactttatgtagatgcaggagagatcagagtcaacggagaaaaaattggacgcgaaatgataaaaaacgcaggaattatcattgaagaaccggcattccttggaaatgaatccggaaggaaaaatcttgagctattgtatatgttaaggcataaacgcgataaaaaaaggattgcagatgttatgcagatgctcggattaaattcagaatctaaaaagacagtgagacagtattcgttgggaatgagacaaaggcttgcattagcccaggcattaatggaagatccggatatattgattttggatgagccaatgaatggactggatagggatggagtaaacgaaatacgtcagctattattgaagctgaaagaacagggaaaaacaatactacttgcaagtcataacaaagaagacatagaagttttatgcgatgaagtatttgaaatggaacatggaaaactgcagcaaattaaactacactaaaaaattatccagacctttggtctggataattttcgttagagagttttctcaaacaaaaaaataatacataatcaaatgaattcattgaagaagcataatatttttcgtataatcaaagatacattagggatatattttttctaagcatcagaatgggaggcatattataaatgctaaatatttattttggggatatggaagaagcaatttataatccggctgtttattttaaaaatatttatcaggatagttggattacaaacgagcgttcaaaagcgatgataaaagatgtagataaatccacggtaattgcaccaagaattattgaaagtccagtgctcggggcaattactccgagagaactatcaggtggtgtgaaaacacttatattgattgatcaggtgccagataaagtgtttaatgcatcaacatgtggcgataattgtgcacgctggcttttgaaaatgggaatggaaaaaaatattacaattaatttaagacatctgatggattttggtgagaaggagtttacaatccatattctaaatacagatcagatagttcatagtatggaagagcttgttatgatcgcagggatgtttgtacgataggaggacaggtaatgaaaaagacaactgtagtttttgatttagacggaacattattagatactttacaagatcttgcaaatgcagtcaattatgcactggaaaagcagggaatgccaaagcgtacattagaggaagtgcgtcaatttgtaggaaatggcgtgcgtctgctaatgatccgggcggtgccggatggggagagaaatccattatttgaggaaacctttgcgctttttaaagaatattacggcaaacattgcaatgataatacaaagccgtatgcaggcgttgtagaactgatcgagacgttaaaggaaaaaggctatgcagtagcaatcgtatcgaataagattgattttgcagtcaaagaattaaacgacctttattttaaaggaattgttcctgtagcaatcggtgaaaaagagggcatccgcagaaaaccggctccggatactgtttttgaggcattgaaggaacttggaaaaacgaaggaagaagcggtttacgttggtgattctgatgtggatttagagactgcaaaaaattccggcatgccatgtatttccgtattatggggctttcgtgacaaagaatttttggcagagcatggggcagagcgttatgcaaagaccgcagaggatgtgctgcggtttgtagaagaaatgtagaggtttggcagattgtgcagtgactcggtagaagtgtgcatcgattcggcaaactgcatatttgcgaggaaagtttgcgcatcataatggggagtaaagcagaatgggaaattttcttccaaaatatccaaaaaattatttcaaaaatcaaaaagggttaagaagcttctggaaaatgatctccattggaatcagcatcatttttggaatattagcatgtattgataaatttgaaaaacagtgggaattaaacgtgttttactttgggattgctttactgctgttttacatttttattcatccggtctggatggatgcaaaaaagaaaaaaggctataagtttgaggaagacaggatttatgtttttaatattctgggaaaacaaaccagaatgatcgcatatcagacgatggaaaaagcggttcaaaaacggcaggtccgttgtaaaaacaacggtcttgtaatcggaaaaggaagaaataaaatctgttttttatacgagccgggaagtctggaagcagcaaagcgggtaagacagtgttacgacatgcttcagaaacacattgagccagcattgccgtgtttcaggcagacaggacaggatttgttagaccgcagagctttttatcggagatgcaggaaacgtcagacgatattgctgttgatcggcagcttttttgcaggcgtattctgccataacagttctgatccggatgcaacggtgatgctgatcgcagcggttgtcgtgggattttgtgaaacgctgacactgctcagtctatatggaacaattcttctggaagcagaaaatgagaaaaaaattacaagagaattcaaagagacagattatatcagggcgaaagatgcgcgttttggcaaagtatacacagccgttgtggtcgtctgtctgcttttgtttaatgcatgggttattttcttttcataaaaacagtacatagaaaataatgtgtaaaggtctggaagaaaaaatatctgacaggctgcggggatgagtgaatatgctgcgggaaaaaatatatgaattgaaaaattggaaattggcggttcacacaacgtggaatccgggcgcggaaaatgtgatgcggattcaccttgttccaccacgctttctgtcgggaaaaatagtgccttctgttgtgatattgaatgggcaggaaatcgtaccggtcagtgaggcatgggcgattcttctcacagagtttatccggcggatcaatgaatatgaaaatcatgcgatagaggagaaggaggtgcagcaggttcttaaggaaacctttggagcggtcagaaagatatatccgaaaacagacccagaagtttttcacagagacttgtcggtcatgctggatacatttgaggatgtgatcgctggaaaaattccacagatggagatcgcaggaataagtcttggggaatatgcaccgtatatgcgggcaccacaccggatggatcttatggtttctgccatgacacgcgaaggaaaatggcattgcaatcaaaaatgcatacactgctatgcggcaggacaaccgctgtcagaagaacaggagcttgacactgaaagctggaaaaagatcatccgtgcatgcaggaaagcaggaattacccaattgacctttacgggtggagaacctacacttagagatgatttatgtaaattaatttcagaggcaagatggtttgtaacaaggttaaacacaaatgggatacggctgacaaaggagctttgcgcagaacttgtacaggcggaacttgacagtgtgcaggtgacattttattcggcagatccggatattcataatgaacttgttggcggtgcacattatgaggaaactgttgctggaattagaaatgcggtgacagcaggaatcaatctgagtattaacacaccgctttgcagtttgaacaaagattatctggaaacactgaaatttttacataatctgggtgtgcgatatgtgacctgttcgggactgatcatcacgggaaatgcaagaacggatgaatcggtacggacacagctttcaggggaacagctttatcaggtgttaaaagaagcagccggatattgttatgcaaacaatatggaaatcaactttacatcgccgggctggatcgcgcaggaaaagctgcaggagcttggactggatgtaccgtcctgtggtgcatgtttaagtaacatggcagtcacaccagacggaaaagtagttccgtgccagagctggttatcgggagaaaactttggaaaaatgggagtgacacgctgggaaaagatctggaatcatccagactgtaaagcgcgccgcatggaaaccgcacagatgaaacaggagtgcccattaaggggaaaggcggagatgacaagatgaaacagacggtgaaaaaattattgtttatgcttggtatcatgtgtttgaccatattcggaaaagagacatcgacaaccgttttggcggacaatttggatgagattgaaaattacacgatttacgcagaaccagacagggaagacggctctgtttatctgaaatatgatattacgtggaaagtgttggatagcgacacagacggtcctctggaatgggttaaaatcggtatcccaaattcgaatgtagaggagattgagggttacagcagtaatattgaaaatattcggtattacaaaaatggcggttcctatgtaaggattgattttgaccggaaatattacgagggtgagacggtagaattttcatttggaatccaccagcatcatctataccagactatagatggcatgagagtgtatcgatttacgccgggctggtttgatgagattgttgtagatgaactgaatatctattggaaatctgacaatataaaatatgttttaaatggatattgggaacaggatggttactatcagtttcgcacgtctttggcggagggggagaaatacactgtaaaaatagaatatgatgcagatgtatttcagacggaagacgacaagaagatttcgcatccggttggaacaggtacaaaaattgtaatggcggttatgcttcttgtagtgccgggcattttgcttttacttatcatccgggcgtacaaaaaaggcaaaccggtggattcttacagagcggagagcggatttggcaatgcgtttactgatatcagaacgagcagccattacacaggcggcagaggtagtggtggctgtgcctgcgcatgtgcgtgtgcctgtgccggaggcgggagagccggatgctcgaaaaaagatttttacggaacaaagcttacgacaatggcaatccgcgaggcgttgaaagacaccgcacatgaggaaatataactgtatggaaacgtataattatatagaatgaaatattcataatttacttaatctcgataaaaaataaagattaagtagattatgaggcttttggctaccgttttacttttcagcatgcaggtttatcggaaggtggaatgaaagagcagttgtttgcatttacatcttccttaaaggatgcgggatatgtatttgaaaaaaaaccgaaaaactggctggaagcgtttgaaggtctgaaagatgtggtcagacagtcgaaggaaaagagaaaagtaatttttatagatgaattgtcatggatggatacagcgaaaagtgatctcatggtcgcattggagaatttctggaatggatttgcatcggcaagaaaagatattgtacaaccgtctgacggaacagatacatttgcagacttttacactgaaagaatgtgaggaatatgtgcaggcagaaggattgcttttgaatcgggagcagattctgcaatattatatgttttttggtggagttccatattattggggatttttgaaaaaaggatatagtctggctcagaatattgaccggatactttttgaagcctttacactgttttactttaaatttttgaaaaatccacctacagatgaacatttctggtcaaatcagttgaatacaccggctgtgaatacgtggatggaccttgcatttgagagagtctgcatggggcatattgttcagataaaaaagaaacttggtatatccggtgtcctgacagaagtatccggaataaaattcccgatctgcaggtgcagaccgggacaaaatatgcaatttatccaacaatggttaccacatatggactcgtgagaaattcttatgctgataatatccagtctgtgatcacgctggaggatttgtttgtgtaaatggcaagacagaaagagtgaatatataaaaataaaagatgttgaagggaagaaattgtaggaatatagtttcttctcttttttcatgtttaaataatcaaaaacgataaatgacattacagttgacaagacagctgtaaagtgttaactttaacaagaatcttattaatgagaaagagtggatgacaaaatggaagtaatgcctcatctgaaactgcgcgatgacctcggtattaagtacgcaatccttcctggggaccctgcaagggtggatcggatcgcagaacaattagaggacgtggaggagttagaatttaacagggaatacaaaagcattgcaggaacttacaagggaatgcgtgtgctggcagtatcgaccggaatcggcggaccttcgaccggaatagcggtggaagaattatcgcggattggtgtgacgcatgcaatccgtattggaagctgtggtgcattacagaaagagatcagattaggggatctgatcttagtgcagggtgcagtgagagatgagggaacttctaaaacctacatagattccatttatccggcaataccggattatgaactgatgagtgcctgtgtacaggcagcggtcgaggagcagattccatgtcatgtgggaatggcacgaagccacgacagcttttacaccgacagagaggacgagattgatgcactgtgggctggcaaaggtgtgcttggctgtgatatggagacggcggcactttttgtgatcggaaggctccgtggtgtgaagactgcctcgattctgaatacggtagtggaatacgaggacag

SEQ ID NO: 14302 - DNA, 4959 bp, Unknown
  gut microbiota DNA sequence
ttccgcatccagcgaatacgctgactgctaaaacgcctgctaaaatacttgataatactctctttttcatgtttttaatctctcctcttttattttctatgatcaaacttatctgccagtttcattccaactgtctggaatatctggaataagataatcaacaatataactgtgacgatcataatatcggtctgccatctggtgtatccataacggatcgcgatagcaccaagaccgccgccgccaactgctcctgacattgcggaataacctaagattgttcccaatgtaatagttgctcccactaaaagggatgttcttgcctccactaacattacttttgtaataattgtaaaattggatgctcccatagatcttgctgcctcgatcacaccggcatctacttcttttaaagaagattcaaccattctggcaatatatggtgctgctgcgatcacaagtggaacgattgttgccgtggaaccataactctttcctacgactaatcttgtaaatgggatcagcaatacaagcaaaatgataaaaggtacactccgcacgatatttgcgatcacatctaaaatcttatataatactgcatttggtttaatcccgtctttgtctgataccgtaaggataattcccatcggaagtccgatcacataaccaaccaatgtggatactaatgtcatataaagagtttcccagataccggtaataatcatatttgtcacttcactactccacatcgcctgtcacctcctcaatctcaagtccatgttctgtcagatactgttccatatcgatctgaagatgtctgtcatccggcagacctaagatcatttcgcctttggctacaccgccgacattttttgtatctgcccttaaaatattgaccggttttccaaactgtaagatcatattagcgatcaccggctcaaatgcggaattttctgtaaatacaatacgcagcttcttatctccctggatcctctccatctgggctgcaactgcaccctctgcttttccactgttttcaggaacatctcttaaaatcagttctctggctgccttcgactttggatggctgaaaatatcttctaccagaccgttttccaccagttctccatgttcaatgatcgctacccggttacagatttcgcggatcacggacatctggtgtgtgatgatcacgatcgtgatctgaaactgctcattgatgcttttcagaagttccaagatagaagcagtcgtctgtgggtcaagtgcactggtcgcctcgtcacagagaagtattttcgggttggatgcaagtgctcttgcgatggcaacacgctgcttctgtccaccggagagctgtgccggataagccttctctttttcctcaagtccgactgtctttaacagttctcttgctttggctctcgcctcttttttcttaacaccctgaatctgtaatgggaaacagatattgtcgatcacattcttctgcatcaaaagattgaaatgctggaagatcatcgcaatgtcgcttctctgttttctcaattctttctcatttaaagttccaagatcttttccttcgatcagcacctggccgtcagtcggtctttccaaaaagttcaggcatcgtaccaaagtactttttcctgcaccggacattccgatgatcccgtaaatatcgcccgccccgatcgtgaggttaatatcctttaaggcatccacatgaacacctttttgttcaaatgtcttggacaaatgttttacttctatttcagacatatcgaatcctttcttttcaaaaataaaaacctattgatttttatttacaactgttacacaaaaaaataacaggctccatcgcgaagatgattcctgtctattatgctctatctataaaagcaaaattcaaaccgaaacatctggcgcacatttttcttttccgcagcacatacaagacatacacatacatctgcacatgcacatcatttctgacatcattcttctgccgttttcaggaaaaatagctgttctcattcccggttcccctttctgcttcttctgctttttgaaaatacaaaactcctgctgctctgatccatgtgctttgtatctccctttcacattgaccattatagcaagagtttttaaaatgtgttaatacgcgaaacctttaatccgttataggatgtacctataactacattactttttccttatactttttcagttcttcaatgtataattccccgatatggctgacttttgcgccttttcgtttgatatatccgattctcattttctcagtttcctttaacggaactgctttataatcgttaccgtttaaatcttcacagataataccggagcagagcgtgtaggcattcagtccgatcatcagatttaagagcgttgccctgtcatttgccttgatcagccgcctatactcataggtgctcttcatctcttccgccagatacagggaattattttttccctggtcaaaggaaagacacggatactcatccagttcttccattgtgatcacatcctgttttgccagcggatgtccggaccacagatatacaaatgtatcgcaggaaaacagctccacaaattccagcccattttccttaaacattttatttaagactttctcattgaaatcattctcatagagtacaccaatctcactcttgaagttttttacattctcaatcacactgatggtcgttgtctcatgcactgcaaattcgtactgttccataccaatctgtttgaccgtctccacaaacgctttcaccgcaaacgtataatgctgtgtggaaacgctgaacttctcttttacttttttgtcgatatacttagactgcagcagcccaaactgctccgttacctgtctggcatatcccaaaaattcttcgccctccggcgtgatgacgattccacggtttgaacgcagaaaaatatccaatcctatctctgtctcaagctccttcatcgtctctgacagacttggctgtgagataaaaagctgttttgccgcctcattcatggaaccgcagtcggcgatcgtcaatgcatattttaactgttgaagtgtcataagctatcttccttttcttcctttgcaatcaatcatgaaagctagttctgctccgggacaactgcaaaaaattcaagttctgcatcactgtcattcatgaggctgtgggtatgtcccttcggacaataatgacacatacccgcttccagtttctcatattctccatccataagaactctgcctgttccctttgtgatatagatgatctcactgttagtctcatgcgtgtgtacgccgatggatgctcccggtatcagttttccgtagataatgcggttcttctcatcatggaacattttggcgtaaagcgatttctccccgcctttaaagtttgggaattcttcatattcctgctcgttataattaaaattcattgtagtttcctcttttcctttttattctttacgcaatatttggacaatagaatttatcattccaaagatgatcacggcatacattatggaattaggttccgtatccggtatgatctgaaagtccataagaagcatacagatcaataaaatgatccatatgatcaatgtaaccatgtagaattttttctttttcatttgtttttcctttctatcatgctatccatacagtttcttataaatctcttccggggtgcaatcaaaagtgccttgttttacaacttcgtaaataggtttgatcgtatccgcattttcttctaactgccttttcttttcctcttttggtgtttgggaaaataaaagttctaacattgcgattaatgtatttttccttacaccaataccttctgcagcacctcatcctccaaaacaatcttctttgcaagctcccggtatgattcctcatggagataagtatggcggaatggtttgatcgacggagccatctcgatggcttttataaaatcttcacgcttcatgccaagtgtcgccgcatagtcaaagaatcctgtctcacggagcacggtctccacccggacatagcggtgatcctgcactttgctcataatataagttgcaatgccgacctggataccgtgaagctgcggaacttctaatattttatccaatgcatgggagatcagatgctcgctgccgcttgtcggcgcactgcttcctgcaatttcatttgcgattccgctcattgccagcgaatccaccagttctttcaaaaacagttcatcttttatcgtctcatacggtgtccgcacaaaactgttcaccgcctttttcgcgatcatcaccgcaaaatcattcacttctgaatatccgcttttctcctcgaaaatccagtcataaagcgctgtgatctttgagatcatatcaccaataccggaatagataaacttatccggtgcagttcttatgacctgcgtatctacaataattccatatgccagctttgccggaacggaagttcgttttccatgcaccagaagagatgcgcttgcgctggaaaatccatcactggaacttgaagtcggaacactaatgaatgggatattgcgcagaaaagctgcgtattttccggcatcgatcacttttcctcctccgattgagatcacggcctgtgtcttattcggcattgcaaatgccagcgtgataatatcatcaatatcgaccgtatccaactcgctgtactccaataccgtgattccttcctgtttcagtgaatccatgacatctatgccgaacaggtcgatcagtccgtttccgaaaaagattacgacctgttccagattctctgccttaagatactgtccgatttttttcaaagtaccgtttccaacttttaatatagatggtattaaaattccttttcctgtctgcatgctgtctcctccctgactatggttttcttac

SEQ ID NO: 14303 - DNA, 7594 bp, Unknown
  gut microbiota DNA sequence
aaacccgcaaaacagattgactaccatgtgcagcctgtgagaagaataaatgatacatagctgcaggatcgtatgtagaaagaaaacgaatataatatatttagacaaactttattttttatttatatataaacctgaaaaagatggtattattgaatatataaggaaactgtcaaaatatactatatacagaggtaggcgtatgggtagattagtagagtttcagaatgtgaaaaaaacctatcatatgggagaagtcgaaattcatgctgtagatggcgtggattttgaaataaacgaaggcgaatttgtggtcattgtcggaccaagtggtgccggaaaaacaaccatattgaatattcttgggggaatggacaaggctacaagcggacatgttatcgttgacggtgttgatatcagttcgtttaatagcaggcagcttacatcatacagaagagatgacataggatttgtatttcagttttataatcttgttcaaaatctgactgcacttgagaatgttgagctggcattgcagatatgcaaagatccgctggatgcgagagaagttttaacggatgtcggattacaagacagaatgttgaatttccctgcacagttatcaggaggggaacagcagcgtgttgctattgcaagggcacttgcaaagaatccgaaacttcttttgtgtgatgaaccgacaggagcattggactatcagacaggtaaagccattttaaaattacttcaggatacatgcagacaaaaagggatgacagttgttgtaattactcataatatggcaattgcaccgatggcagatcaggtaatccgctttaaaaatggacaggtaaggaatattacacgaaacagtgagccaacaccggttgaacagattgaatggtaggtgactgctatgaaaaagaaagcactggccaaagaattttttatgtccataaaaaagacatacaatcgattcatatctatttgcctgatcgttatgctggggacagctttttttgcaggggtgaaagcagcagaaccggatatgcaggaatcagcggatatcttttttgacgacagtaagttaatggatatcagagtgctgtctacattaggattaacggaagatgatgttaccgcaatttctgcaattgaaggtgtagaatcagcgatacctgtatatacatatgatgttctgacggagaaagatgaaaagcagcatgtgatcaaactaatgtcagaaacaacggatatgaataaaattactgtgacagaaggcaggatgccgcaggaatctggagaatgtctggcagactggcttttggaacaaaattatgggtataaaatcggagataagatcacaatcagctccggagatgacaaggcaattgaagacattgtcaatacgcagacatatacgatcaccggattcggaaaatcgtcatattatcttgatctgacaagggattccagcacgattggtaatggttccatgtcaggatttctgattattccggaagataattttacgctagaagcatttacggaaatcgatgttcttgttgatggtgcgatagcattggattgttatagtgatgcttatgaagatgctgttgatgaagttacacagaaaatcaaagatattgcaggggatcgatgcgaaatacgatatgccgaagttgtacgtgaggcacaggatgcgatagctgaagctgagacagaggtttctgatggtgaacaagaacttgcagatgcaaaagaggaattagaggatggatgggaacagcttgcagatgcaaagaaggaagttgcagaaggccagacggagcttgcagatgcgaaaacgcaggtcagtgatggggaaaaggagcttaatgcagctaaggataaagttgctgacggtgaaaaggaactggcagacgcaaaaacacagcttgcagatggacagaatcagatcaatcaggcgaagcagcagatttcagatggtgaggcttctatcgcagcgtataatacagaattagacaatggaagaaagcagcttgagagtgctgcagggcagcttgcagatgcgaaaaccggattagaaacattaaaatcagggattgagcagatggaaaatgctttaaatgccagtcagacggaactggatgcttccggtgcggttttaaaacaggcaagaacagaacttgaagcgaaccgtgggcagatcgatggttacagaacacttgtcgcaacaatggattcacaaataacggcacttcaggcacagatggaccttcttgcaggggggagcaaagaatggcagacactaaatactcagatgcaggaactgatcacgcaaagagatgcgatgcagaccggtattgctgaatttgatcaaaacgaagcattgcttttacaaaatgaagcggcttatgaagaaggaaaaaaggcattagatgcaaaatgggcagagcttgctactttgaaaaaaacatacgacagcggcatgacagactacacggcaggtatgtcggcatatgaagacaacctgtcagaattaaatgcaaatcaggcgaagcttaatgcacaaaaacaggtattaaccgagtcaaaacaaaccattgcggcgaaagagcaggaattagcttctgcacaaaacactattgcagaaaatgaagcctccttagattcagcgaaagccgaaatcgcagaaaatgagaaaaaattaaatgatgcacagtcagagataaataaaaatgagaagaaactggcagatgcaaaaaatgagatcaaagaaaatgaacaaaagctgacagatggtcaggctgaatatgatgccgaatatgaagaaaatcatcaaaagcttgaagatgcgaaggctgacattatccaggcgaaagcagatcttgctgatgttgatgtaccggagtggtatgtactcgaccgtaattatatcactacctgtgttgcatatgcccaggattcagaacgtataggaaatattggaaatgtttttccggttatatttttccttgtggcagcactcgtcagtctgacaacgatgacgagaatggtggaagaagaacgtgttcagatcggtacactgaaagcgttgggatataggaaatccagtattgcagcaaaatacgtcatgtatgcatttcttgctacgatgttaggcggcacgatcggtactttgatcggacagattatttttccggcagtcattatgaatgcctataagatcgcatatgttacattgacagattttgtgacaccgatccatttaaaatattctctgatttcaatgatcgctgcggttgtcagcaccacagctgctacgcttgcggcatgttacaaagaacttcttgccgcaccggcggaattaatgagaccggcagcacctaaaatcggaaaacgggtttttctggagagaattacatttatatggaaacatcttaatttttccaataaagcggcagtgagaaatctgttccgatacaagaaacgtttgtttatgactgtacttggcattggcggttgtatgggattactgcttgttggatttggtgtaaaagattccatcatgacgatcggagacaggcaatataatttcattcatacataccaggttaagatgacactggccgatgcggatacggatgaagagaaacaggaagttttagacagtgttcttaaggagccgacaacaaaggcagctatgctcagtcatgaatctacgattgatgcatgttgtggagccaatggagaaaagaagcaaagcacgtatttgttcatcccatccgacgcggatgagttagatgaatttgtatctttgcagaatcgtatatccgggcaaaaatacacgttagatgatgaaggtgtggtcattacagaaaagctggcaactttgctggatgtatccgagggtgacgatatttatcttgaggtttcaagcttaaattataaacctgttaaggtaatgcacattgcggaaaattattattaccattatgtttatatgacaccggaatgctaccagtcattatttgggaaagatattgagtatgatgaaatatttgtcgtaaataaagacccggaagatatttcttatgaaaatgatttttcggcaaaatatcttgataacaatgcagtgtcaggaatcacatttacgcgtacaatatcagaccggatagaatcaatgatcacaagtatgaatattgttacctatgtacttgttgtgtctgcaggactgcttgcatttattgttttatacaatttaaataacattaacatcagtgagcgtcagagggagctggcgacgctgaaagtgcttggcttttatgatggggaaatatcaatgtatgtattcagggaaaatattatgctgacagtgctcggtacaatttttggtattttctttggaatatggctgcatcggtttgtcatcttaacagcagaacttgatatcatgatgtttggccggcagatttatacaaaaagttatatctatagtattttacttacaatcggtttttccattattgtgaatatcgtgatgcattggaaaatgaaaaaaatagatatgatcgaatcattaaaaagcgtcgaataactcctgcttgcatatattatttgcagacagtataatcgtatggtcagtcaattgacatatattaatactaagaactaaggaagaactactgtatgttaagtaaaaaagatttcttaaagtatgcatcgacactagcatttccgattatgctccaaaatctgatcggaacattggtaaacattgctgacacggtaatgcttggatacgtgagccagactgccatgtcggcttcatcgcttgctaaccagtatacgtttattcttttctgtttatattatggtatggcaacaggtacttcggttttatgtgctcagtactggggaaaaggtgataaaaagacggtagagaagattctgggtcttgcagaacggatctccctgattatctctcttatattttttgttatctccttcactatgccaacggcaattatgaagatttttacaaacagtcctgagacgatcgctacaggaagtgagtatctgaaggtgatttcattttcatttgtattcatgggattttcacagatttttatgagtgcgctccgaagcatcggaaaaatcatgctgccgtcggttacgtatattgtttcgctttgtgtgaatgtattttgtaatgcatcctttatttttggattgtttggtcttccaaagctcggtgttaccggtgtagcacttggtactgtgatcgccagaatctcagaagtgctgatctgtctgatttattcattgcgcagttcagacgtcagattcagaataaaatacttctttgcaaaatcagatattctgttacaggactttataaaaattgccactccggcggtgataaatgacgttgtctggagctttgccaattcagcgtttgctgcaattcttggtcatattggagatgatatggttgcagcaaatgccgttgctgttatggtggtaaatatcggtgctatcgcctgccgtggttttgccaacgctaccacgatcattgtcagccaggagcttgggaaagaccgcattgatacagcaagagaatacgggaaacgaatgctgggaataacatttattgtcagtctgattgggtgtgccgttattctggcgatccgtcctatcatactggatttttaccgggataaattaacagagacggctatttattatcttggcatttttatcattatgacaacctggcgttttgtaggcgaaggtattaacacctgtcttatatgcggctgcttcaggggtggcggcgatgccagatttggaatgatcgtagataccatatttatgtggcttgttgcagtcccacttaccttccttgcagcatatgttttcaaactgccgcctgtctgggtatactttgtcatgacactggacgagtttgaaaaaatgcctgtggtatttattcactatttcagaaataaatggcttacgaatattaccagagattttgagtgatggcctcagaaataaatgattgacaaatcaacatgaacgatgtatattttcaagatgaacagcgttcagatatgaaaaataaaagaaatgccgaaatgtcaaagggggaaattatgaatcgtcttgctacttcaaaagaagatatattggctgccagcagggagctgatcaaagaaaacgggtgggcggctgtaagcataagatcagttgcagcgaaatgttccgtttcagccggtacgatttataattactacgaatccaaggcagagctgcttggtgctaccattgagagtgtctggcaggaaatcttttttcatccggaagacgagcaggtatttcatgatgttacaacttgcatttcatggatttatgaacggttcaaatatggcaataagcggtttccgggatttttctctttacattcctttgctttcatgaaggaaggaaaagatgacggaaagaaaaggatgatgcgtacatggggacatattttaaatggactatgtgaagttttaaaaaatgatcataagatccgtccgggcgtattcgatgagaattttacagaaatgcagtttgcagaaatcctgttttccctcatgctggtatcagtgatccgcgaggattatgatccgtcctctgtgttgatgcttatcaacaaaacattatattaaaagcagttattgttcacattgtgtgtgatcagtaacggaaattctcccactttgaaagtgggaaaatttttgaatcaaaatgaacagtgttcatgtattgtaatttttaaatgattgtaattaggttgaggctgttttcgcagtccaacgtaattcaatataaaattttaaaataagaaaggaaatttatcatgcaggcaattgtagaaactttatttgacaccgtatatttaatctcggtaatcacgatcggaattttaatgatcagaaagagcaaaggaaatcgccagtttactatgtttggaattatggcagttcttttgggaagtggagatgcattccatctggttccacgtgcactagcgctttgtacaacaggtcttgagaactttacggtacagttaggattgggaaaatggatcacatctgtaacgatgacaatcttttacgttgtgctttatcacatctggcgcgaacgttatcagatcaaaggtcataatgcagtgacagcagctgtttacagtcttgcaggattaagaattattttatgtatgatgccacagaataactggcttagtgcatcagctccgctttcctggggtatttaccgtaatattccgtttgcactgatgggaatcctgatcattgttttattctataaaagcgcaaaagagaacaatgacaagtctttccgttttatgtggctgacaattgttttaagctttgcattctatatcccggttgtgctgtgggcggatgttattccgatgatcggtatgctgatgatccctaagacatgtgcatatgtctggacagtcgtgatcggttacaatgcgatgaaaaaagagatcgcttaagaaaaaacactgaaaaag

SEQ ID NO: 14304 - DNA, 2717 bp, Unknown
  gut microbiota DNA sequence
caacctccatatcccgttgattgttgatcaattctgtaagatcctctcttaaaagctgaaaatcatcagcgatcaaaatctttttcttatctgccattttcttctcctgtctgttatctattcgtactttggaattaaaatatagaatttacttccctttccctctgtactttccactctcattttacccagatggctttttacaacctctctgacataatataagcccattccccagttatagttagaatttttgctggaataaaacggatcgaaaatcttctttatctgactctttgacattccaagtccattatcactgacctcgatcaaagtatataatctttcattcctgcattttaagcatacctgcccttcttctccccgttctgcagctatgacggcttcttctgcattgatcaggaggttatagattgcctcacacagatgatccttatctgcaagaaccatagacacttcctcgttttggatgcgcactcccgcatccggaaatttattgtgaaaccgttctaatgtcgtgtctatgatctcctgaatattaaccggcatcatcgtaatggaattagattttacactgcggtacagttcctcaattcttgtaaacattgtatcgtttgtagcccggagtgcatcaatacattctttcagcttcaccgtatccggctccggctgactgtaaatctggtcaattcttttataaataaccttgttggcaagaagctgatttttcatgctgtgaacgaacatggaaactcctaccctcactgtatcgaatttccgttccatcacaacatccgtcatggcaacttcataatcaccttttgtatatttaaatagactgtaaaagccaagcacagcacaaatgatatttacaatcacaagcataatataacttgccagagacggattaatctgaagatatccgattcccctattccatgcgatcgaatacccgtaaaagagataaacctgccccggatcctgatgatagtaaataagataaattgccgaaatcgacaccaaaaagattactgtctgctgaaattgcctcttcaaaaacaggattgaaatggaaaaatactcgattaataaaatcaccacagatactgtcagatatagattgatccagatcatatttccttttgctataatctcctgcatactttccctgttatgaacaatcattctataaactgatggaaagtaaagaatcagcgacatgatcggtatgacccttgataatttaacccatgttttccgctttctaagtcccggaagcattgaataattcattgcaatcctcagcaaaaaaaacggaaacagagacctgcctatggcaatcagatatcccagctgacctaatgtgatcaggaaatactgcatcttccgatatatgtttcttgaaaaatacagaaatgttaatacttcctgtgaaatgccacctttttttgcaataaaaagcataacaccacataattccaacataagacttgtacaaagtcccagccataagatggaatctttattttttctgtaaatgatcaagaataccgatgcaataactaagctgaatgccaaaataagtaacatgtttttgtctcctgtttccgttttcttaaatcttttaacaaaaaaatattcagttatattttaacactattttttgttttcttctacctctctatgagatttcctccaacaaatacatctgcgatgtcattctccgcatctaaaagaacgatatctgcatcttttccatctgcaatcgatccttttttatcatatactttgataagtctggctggattctctgaaagaagcggtaaaatctcttccagacgttttcctgtaaatgcaagaagatttttcaaagcaacattttgtgttaaggtacttccggctcttactccgttttccagctttgcatcaccatcttcaacaataacatcgtttactccaagtttatatcttccatccggtagacctgcagccataattgaatctgtgattgcaactactttgtcaagtcctttcaccttcaaaagaagacgtactgtaccagggtgaagatgtcttccatcacagatcgcctcacagtaaatatcagattctaatgcagctcccataattgcaggaaaatgctgatgtaaaagtttcatcgcattaaatgtatgtgtacagcattctgcaccgttgttgattgctttccagcttgtatcataatctgctccggaatgtccgattgcaacagtaataccaagctctttcattgccggaatgtcatcaataagtccttctacttccggagaaatcgtaatataacggatgtttccttctgctctgtcctgatattctttcagaagtggcatattggctttctgaagaagatgctccggcatagcccccttgtactctgaagacaaaaatggtccttccagatgaataccaagtaaatttgctcctttatgctccatcttctgatgtttcttatattcatcaatgcaccattctgtctgttcttttgtatcagtcaaaacagaacataaccatgaagtcgttccatttccggctgcaaaacggcagattttctcataatcttctgctgttgccgcattaacatctacacctactgcaccatgtgtatgtacatcaataaatccaggcactactttctttcctgctgcattatacacttc

SEQ ID NO: 14305 - DNA, 86245 bp, Unknown
  gut microbiota DNA sequence
tagaaagaagaatgtcggaaagccgtgtgagggagaacctcatgcacggtttgatgaggggcggatgaaattttcatccgcctactctacattgctatagcttttttaattcatcgattgacagaccggtagcacgagaaatattctctaaagacagcagattaagctccaatagatgacgtgcagtattaaggacacccttttgaataccagcctcatactccgctttccgaagtttcttttcttcttcttccttgtcatactcaaatatactcatactgataacctccgcgcggttctttcgaagaaaatccgcaagaatattttctttaatacattcatcaacagcacgttccactgcctcgttcagagacaggtcggctgtgtattttcgcacctttgcaacatattgcgcatattcccttaatgttttgtaatgttccataagaagggcattgtgaccttcattgatatttaagacagttacgatcagctccagttttggctcgcccgacagatgttcaaaagcagaggaaagtctgtgctcgaaaacatcggaaaccggatcggaaccattataaaactcaataaaattaggagcaggtatcataaagcgagagcagattctttttgtctgaaaataacatccggaaaacagtatctttgtagttgcgatttgcagaaactgttcctgctgtggttgatttgtaatgatcttgtgatcgcattgccataggctttcctccttatcacgatggacggcagatgcgcataaatgcatcgtgcctctggcaggagaatagagcattgtaaaaatatttttcatccgtctcctgcttttaaattggttaatgggtaataaaagcatagatacgaaatgaactgccccggtcattgtcggttgaccgaaagctttctagattacagatgactcttaagccacaaagattttgtaaaatatgctttgaaatattgtatcataccaacatcagaaaatgcaatggagaaaatagtaaacttttaaatattatgagcactaaaaaatcaataaaagaattaattcaaatctctgcaccagtagctcaaacaaaagaatcatgctacaatgaaccaaagcagataaaaacagcagaaatgccatagaatagcaaaggagatcatcatacatgaaccttaacattttatatgaggacgaaacattgatcgtctgtgaaaaaccagccggagtggcaacccagacaaaacggttaggacaggctgatatggaaagtcttttgaaaaattaccgggcagccaagggcgagccgccttatatcggcgtggtacacagactggatcagcctgtgcgaggcgtaatggtttttgcaaagacgaaagaggctgcggcagatttaagccgtcaggtgcagacgaagctggcagataaattttactatgcagtgacagacggagtcccggagaagaaaaaagatacattggaagattatctgctccgggacggaaaaaccaacacatccaaagttgtgagcaaaagcacagagggagcgaagcttgccagactgaattatgaagtactcgaacagaacaaaacgaacgcaatccttcggatacagctggataccggacggcaccaccagatccgggtgcagttagcgaatgccggaatcccgatcgtgggggatgcaaagtataattttaaagaggcaatggcgcgaagtggaaacgggcttgcactctgctcttacaaaatcggatttaaacatccgaaaacacataaaaaagttgaatttgaaattccaaatccatttcaaatctaagaaaaacgcatggatgaaaaaacgcttgcgttttttctttttaaggttatggaagaaagctgaatcaataaagatgagaggaacagattttacaagaaaaaacacgaaaaaagtcgaaattacagtagcaaaaaacacacaatgtgctaaaatacaagtatagtttaaattcgttcgtacaaaaagcttggcaattgcgaaacacaacctaaatcagagtttcacaatcacctaaaaacaaaagattggggaggtacgtgtatgaacaacataaaagtaagaacaaaattaattatcgtaatgctgatcgcactggtggcactggctttgtgctcgatcgtttctaatacaagtctgtcaggacttggagataacgcattgaacattattgagaacgacatgcgttcttcttatgatgaacagattaagtcacaggtagacaatgttatttcactctgtcagggcatttacaatcagtatgaagccggagagtatacactcgaggaggcaaaaaaactcgcggcagaccagatccgcgatctgcgctatggtaataacggatatttctgggtagatacctatgacggaacgaatgtggttctgcttggaaatgacactgagggaacgaaccgtatggatgcagttgacacgaatggctttgcatatattcaggcaatcatcagtgccggaaagcaggaagacggcggcttcacagattatgtgttcccaagggaaggagagacagagtcctctccaaagcgtgcatacagcaaagcgtttgagccatttgaatgggtgcttggaaccggaaattatacagatgatattgatgatgaggtacttgcagtaaagacagagtttaactcttatgcgtctaacagcagaatgatggtcatcggaatcgcagttgtcatggaagtgatactgatcttagtgctgaccatgatcacagtcagtgttgtaaaaccattaaagagaagtcttacccatatcaatgaaatggcgcagggagatttctcaaaagaatttgaacagaatctgttaaaacgaaaagatgattttggacagcttgcaggttccctggaaaaaatgcgtgccgagatgaatgaactgatcggggaggtaaaatccgaggcattagagatcaccggcatggtacaggagattgatacaagccttcaggctttggatgatcagattgagaatgtatctgcaacaacagaggaacttgcagcaggtatggaggagacagcagcttcatccgaagagatgaatgcaatgtcgcatgagattgagagcgcagctaagagtattgcagagagatcacaggacggtgcaacagaggcagattctatccggaatcgtgctgtgaagatcaaaaaagatacagatgcaaatgacagacggacgagatctatccatgaggagattaatgtcagcctgacaaaagcgctggatgatattaaggtagtagatcagatcaacgttcttgcaaaatcaattatggatattacaggacagacaaacctgcttgccttaaatgcttctatcgaggcggcaagggcaggagaggcaggaaaaggatttgcggttgttgcagataacatccgtgtgctggcagagcagtccaaagacgccgtttcccatattcaggaagtgacagaaaatgtcacagcagcggttaataatcttgccaaagatgcagagcgtctgctcgaatttgttggaaatgatgtcgtagagagccttggcggattcgcagaaatggcaaattcttacaacagtgatgctgctaacgtggattctctggtaacagatttctcagcatcctcagaacaattattagcttccattaacggagttatggacgctatttcagatgtcagcaagacagctacagaaggagcaaccggcacaacagatattgcagaaaaagtaggaaatgtcgtgcaggaggcagaggcaatcaagcagaaagcagagactacttaccgttctgctgaaaaattacagaaaaatgtagagcgctttattgtctgacgagaataagacttaagggaagttttaaacaaaaggggatcgtatgatagagaagcattataatggggttattgaacaggtcgtaagcggcatcggaaatgttgaacacaacagtattcttgtccgttacagcaatgacttttccatttgggatttggagagcgtgaatcattacaaagagcagccggatatcttttttacctgtcatgagttttcctacaaccgggtcgcagaggcatatgagccgtatcttgcgctgatccggcagatgtttcacaagtatggaagcggtacgttagaagaattcatggaggaatgtgacgtttataaattgcagagacctgtgtttgaaagctatttcgagaccggattttgtcagcggacagagcagatactgatcgatgaagtcgagtacgagcaggaacggatgaataattctatcgtgacaatgatccggaaattatcggagatctgcccgattgtcattgtgttaaatcgttttcagcttgcttcgaaaagcacgatgcagcttaccaaccagctgcttcacacaaagaataaaaacatcggaatcgtgttaggtgtcaatgatgtgcagtccattccagaatttgtgcatgaggagtgggatgcaatctgtgagagcatggatgaccggaacatggtgttccatatcggaaatgcaaataagaaaaaagaatcggatgttctggtttattactctgattatgagagtgaggaaggataccggaagctgaataatctggtgtactttttggattttgaccaggcggatcatcatttgagcaagattgagcgccggatcaagtttgataattttacgatctcaaagaaaaaatattatcagttgctgctgttacagatcatggtttcgattttacagagggatattgccaaggcgttagagtcctgcgaggatctggaaaaattgcaggatcaggaaaaagaaggttctttttattataacttctgggtggcaacttcttacatgtatcttggaaaattagaggaagccatggcatttgcaaaaaaagcgggtgaatgcggcgtagcgcttgatgatgattttctgatgttccgtgcggaacttttaaaagcgcagatccagatgtccggctggtgtaatatctttttctgtgcacaggatatcgagattagtgacaagctgatcgagcggctgaatgcctaccattataaaaatcatctggcgcacatttacatttatgcctatgacaataagccggagatcgtggcgaaagcataccgctccgaggcatttctgatttacttttccaagggggttgcaattgcaaaagaaatcggaaatgagcagctgatgagcattgcttaccggaaaaatattatgatcgcgtccacgaatggagagtatgaggtatcgcttctgtattcgatccgcacctatgaggcaatgaagaatgtcgacagtgtcgagggcggaaggatttattccggtattgcgtataatttgtgtgcaatgggagaaaatgaaaaagcccagagttattacaacaaagcaattaagatattatgtaaactaagaaagccggaggatattgcagaggtacattataatatgtctttgaactgcattatgctcgggcagtatgaaaaagcgcaggaatacctcacacagtgcatgaaagcgattgaaaagcttcatctgaacagcctgcgtgtctgcaatctttccaagctgtacggactgtttgcgttagtttccattttgcagggaaaccgttttaactgtgagcggtatttatatagctgccgccagtttttaaattatatttttgaaaaagaaaagacagagaacaatcttgcaaccgtacacgactatgcaaaagcggatgatgatatgtttttgtatacattttccaaggcactgctggcgcggtacgacggagataacgaggaagcattaaagctttacggacaggcagagatttatctgaaaagagcggaaggaaaccagtttttcagttatgcgctgtttcgcaggagcagaatggaatgttttaaggatgcaggcagggatatcctctatgagcaggagaagttcattttaaaacagtatgaggagacacaccagatcatgttccatgagtatgcaggggatatgaaagatcttctgccaccggtggatgacgacgactgcgaggaactttccagcagggagatcgaggaactgttaaaacaggaaagtgtggagcgggcttataagagcaagaaggaacagcttgattttatttcaatctggcagaagctgatcgacgtgaatggcatttcagccaaagagatgctcgacatggtcatgaagacatttttaaatcattttgatgtcgaccgggcagtttatatccgctacaacgagcgtacgccgcaggtgctttacaatgacacggaaaaagagatcacgccggagatcatgaagatcatggagaaatccatgcgcaaaaatacgagtggatttgtggtttcgaagatcagcagtaattattcggaacatcaggatatcacctctattttcggggatgatgatgtgtgctccatggtggcgattccattttttaataatgcgaagattgagaatattttcattacttatgtgttgatgaaagacaactggcattcgtccgtgaaccgttatatgttagatgaggatgatctgaacttttaccagcttctcttccgcgaggtgcggtatgcgttaaatcgtcttgacgcttatgataagatttatgagatgaatacaaagctgtatctgtccgcagtgaccgatcagctgaccggcattttcaaccgtgagggattctaccggaagttagatgaacttttgcaggagatctcaggtggaaaaagagagccgaagcttggcttaatgtttattgacctggataatttcaaacattataatgatacatacggacatgatgtgggtgattttgttcttgtgaaaatggcagacatttttaaggaagtgtgcggagaggacggattcgtctgccgttatggcggggatgaatttctgattttcctttacacggatgataaacaggtctttacggaaaaagcagagcagatttatcacaagcttgaggaatcagacggattttctgcggagatcagcgaacggctcggacagagtttttcgattgacaaaaagcaccagatttcctgctccattggtattgcagctggagaccatatctgtacggaagatgatatgacagagatgatcaagaaagcagatgatctgttgtattcgattaaaacaacgacaaaaggaacttatcgtatatgaaaatcgttttacctgagaaagtaacctatattatcgacacgctgacagagcagggctttgaggcttatgctgtgggagggtgcgtccgggatacgatgcttggcaggattcccatggactgggacattaccacatcggcaaaaccggaacaggtaaaagcgttattccaccacacgatcgatacaggaatccagcatggaacggtcacagtcatgatcgaccatgaaggatttgaggtgaccacgtaccggatcgatggggaatatgaggatgcaagacatccaaaggaagtgcagtttacatcgaatctgttagaggatttgaaacgccgtgattttacgatcaatgccatggcttacaatgacaaggacggacttgtggatgcatttgacggtgtgggagatttagagcgcggtgtgatccgatgtgtcggagttgcagtggagcgttttacggaggatgcactccgtatgctgcgtgcagtgcggtttgcggcgcagcttggttttacgatcgaggatgcgacaagggaagcgattgtttctctggcaccaaatattgcaaaagtaagtgcagagcgtattcagatcgaaatggtaaaacttcttacttcaaagcatccggacaagctgcggacagcttatgagacaggacttaccgccgtgtttcttccggagtttgatgtgatgatgaggacaccgcagaacaacccgcatcactgctattcggtgggagagcatacgctgcatgcattaatggagatagaaccggataaggtggcgcgcatcacaatgttactgcatgatgtagcaaagccggtgtgcagaacaacggatgatgacggtgtggatcatttttacgggcatccgaaagagggaagccttatggcaaaaaagattttacgccggttgaagtttgacaatgacacgacagaccgggtgtgccgtctgatcttatgtcatgatgataatccaccattgcaggaacgcgcggtccggagagcggtctgccggaatggcgtggatcagtatccggcactttttgcagtcaaaagggcagatacactggcacagagcacatatgagcgcgaggaaaaattgcagtatctgaaggaatacgaagcagtttataaccagatcatggcagagaagcagtgtctttccattaaggagcttgcagtgaccggaacagatctgatcgctgccggaatgcagccgggaaaagtaatcggcgagactttgaaagagcttctagagtatgtgttagaaaacccggaagataacaccaaagaaaaattaatggaacaggttcataaaatcatgtcccctcacatatgatgaattgacacgataagcagacaatgcttatcgttgcagattcgtcgtatggaggggttttttcatgtatatcaggccggaacagatcgtagaacaatatgagatggaagtaaagtctatttcgaaaggaagggactgttttctgtgtgaaacagacctcggaatgcgtgcactcaaggagtacagaggctctaaggaacgtgcggaatttctggccggaatgctgcaatttttaaaagagcagggaatcacagcagagcagattttctttacaaaggaaggggaaccctttgcgaaggacgaggaagaacagaattatctgctgttgtctgcattccgcggggcggagtgtgataccaaaagcagggaggacatggtctgtgcggtaaaattgcttgcaggtttacataatatatcggaacaatatccgggggaagtgccggagtttgtaaaacaggatccgaatgcgctgttgcttttgtatgaaaaacataatcgggaactgcggcaggtgcgcaattatatccgtggcagaaagcagaaaaatgaatttgaggaaatgtttatgcggcagtatgcgcactattttgagaaggcgcaggcggtcacagagcagttaaagcatatggaggcatctgtggagctgatcggattctgccatggtgattataaccagcataatgtgatcttctcgcgggagggcgtggcgattgtcaatttcttaaatttttcctatcagatccgggtgagtgatctctcgaactttatccgcaagatgatggaaaaaaataactggaacacatcactaggaatggaactgatcggtgcgtatgattctgtgcggaaattaaaaccgcaggaactgtcctacctgtatttttatcttgcatacccggaaaaattctggaagatcgccaaccactacaatcagtcacataaagcgtggctgtctggcagaaacatcgaaaaactcggcaaagtgatcgcgcaggaaggtgcgagggagcagtttttgcagacacttgcaggaaaagtgggaaataggatataataacaaatagtagcgaaactcctcgtaggttatgccgaattgtgaaataccaacaaaaacattcaagacacgctctcgctacgtgtcgctcgcagcggtactaagaagtcatatcctgcatttcatttctgataaatcagaataaaatacagaatatgacttctaagtgccggcggctccccagtgtctttcatgtcttttgttggtatttcacaatttaattcacgtgtttacgagtttcgcaatttacatgatttagatgacacataagaggtgatacgttgagaaaatcaatatacatattatttatgagtatttttagtatgattatgatagcgggctgtggacagcagacaagaccggtctcgactgcacagtactataatccggcgaaagagacagcagcagatacagaggaagcagagggtgcatgggagaagacatcgatcggaaccgatctctatctgatcatggaaaacgacatgacgaacgaacagttgaatttaaagcagcttgcgtcgggaaaacagtatctgtacgcctattccttatcgaccgattttcaggataaatatggtgattcggcaaccactatggattttgagccgggcagagtcatccacatcggaaagaaagacagtgaaggacgtcttttgcaggcacagattgcagatgaggtatgggagtatgccgatatcacaaaatattcggtcgatacagagcgtgggatttttaaaatcgcagattccaagtattcgtatgacgcagacttgtttgtggagtcaaatggcgaaaaaatacgtctgtccgatctgaatgagaaagacaaaatccgtgttgtaggaatcggaacgaaaatattgtcagtttccgtgactaccggacagggaacgctggaattgaaaaacacctcggtatttgagggaagctttattcaggtgggaagcaaaatttttgccgaaatcacgcataatatgaaactggaggttccggagggaaactatacggtaacggtagccaatgagggatatggcggcagtacggaagtaagcattgcgagagatgagacttacacgcttgatcttgatgaactaaagggcgaaggaccgaaaaccggaagtattattttctacattgatgtggaaggagcggtgctttccattgacggagagacggtggactacagtgttccggtggaacttacctacggagtgcatcagctccatgctgaggcggaggggtatgaggactttgacaaaaaactttttgtcaattcggcagcagcgacgatcgacctttcacttacgggtgacagttcgtcctcagacaatgaagtaaccgagggcacagagacagtggaaacgaccgagagtgcagaggcagataacagtggggataagacggaaagcacggaaaaagcaaccgacacaacagagaaaacaaccgatcaggatgtgacatccgattatctgtcaacgctttcagatctgatcacatcgttgaataaataatgaaaatagagcttgaaaatagcgtttaacaaagctaaactatatacgagatagatagcggataacgtttttgggatataaaatgttattcgcggttaagttagagcgactatcccggtagttgcgaatttagggaggaattatcatgggatacaaagaaatgtatgaagaatggttaaataatccatacttcgatgatgcaacaaaagcagaattaaaagcgattgagggaaatgaaaaagagatcgaagatcgtttttacatggatcttgagtttggtaccgcaggtctgcgtggcgtgatcggtgccggaacaaaccgcatgaatgtttatactgtccgcaaggcgacacagggacttgcaaactatatcaatagtgtacatgcacaggagaaaggcgtagcgatcgcatatgattccagacatatgtcaccggaatttgcagatgtagcagctttatgtctggcagcaaacggaatcaaggcttacgtgttcgaatcactccgtcctacaccggagctttcctatgctgtccgcaaattaggatgtaccgcaggaatcaatatcacagccagccataacccaccggaatacaatggttataaagtatattgggaagacggcgcgcagatcacaccaccgcatgataccggaattatggcggaggtcaagaaagtaactgattatgcagccgttaagaccatggaaaaagatgccgcagttgcagcaggactgtatcaggtgatcggagcagacatcgatgatccatacatagaagaactgaaaaaactgatccttcatcaggattgcattgataaagtagcaggagagttaaaaattgtatattctccacttcacggaactggaaatatcccggttcgccgtgtgttaaaagagcttggatttaaaaatgtttatgtagttccagagcaggaacttccagacggagatttcccgaccgtaagctatccaaacccggaagcagcagaagcatttgaattaggactcgctttaggaaaaaaagttgacgcagacttaattcttgccacagacccggatgcagaccgtcttggcgtttatgtaaaagattccaaaacaggtgaataccacagcctgaccggaaatatgtccggctgtctgatcggtgattatgtgatcggtcagagaaaagcattatacggactgccggaagacggagcatttatccgttcaatcgtttccacaaacatggcagacgcaatcgcaaaatactatggaatccagttggtagaagttttaaccggatttaaattcatcggacagaaaattcttgaatttgaacagaccggaaaaggaacctatctttttggtatggaggaaagctacggctgtctgacaggaacctacgcaagagataaagatgcggtggacgcttccatgacactgtgtgaggcagcagcttactataagacaaaaaatatgacactctgggatgcaatgcttgaaatgtatgagcgttacggatactacaaagatgacgtgacagccattacattaaagggtatcgaaggacttgcaaagattcaggagatcatgaacaccttaagagagaatgccccggcagagattggtggatacaaagtaaccgcagtgcgtgactacaagaaaaacaccattacagataccgcaacaggtacagtaaaaccgaccggacttccggcttccaatgttttatactatgaactggaagatgatgcatgggtatgtgtaagaccttccggtacagagccaaaggtaaaattctatcttggtgtaaaaggaacatccttagaagatgcagatgcaaaatcaaaagcattgtctgagtctgtccatgcaatgatcaacaaaatgctataaatgcccaaaatataggaaatttccttgacaaaggcatagaaaacaagtataaatatggatgtaggtattttggaaaagaaaaaacctcatatatcataaagtgaaaatccagaggaggaatttttaacatgaacaaagcagaattagttgcagctatggctgagaaagctgaattaagcaaaaaagacgcagaagcagcattaaaagcattcacagatgttgttgctgaggaattaaaaaaaggtgagaaaatccagttagttggattcggaacattcgaagtttctgagagagcagagagaacaggacgtaacccacagagcggtaaagagatggttatcccagcttctaaagctccaaaattcaaagcaggaaaagctttaaaagacatggttaacgcataattcttttttgaataagaatgttatcgagcccggattttccgggctcatttttttattgcataggaagaatttcctatgcaataaaaaatgctccgcgaggatgcgactgatgcgcagaagaattatgcaagctaaagcttgtgcgcatcagcgcgaaagagttgcaaagcaactctttattctaaaaaattctccatggatttaggaaggaaaaaatagtatgagattagataaatttttaaaagtatcacgtttgattaagagaagaaccgttgcaaatgaggcatgcgacgcagggcgtgtaatggtgaacggaaaacctgcaaaggcatctgttaatgtgaaagtcggagacattatcgagatcgcatttggaacaaaaagtgtcaaagtgcgtgtgttagatcttcaggatacgacgaagaaagaagaagcaaaagacttgtttgaatatgtatcctaaatatattctatacgcacattagcgagggcagttattttttgtgagcataaatcgaagaaccttttcatatatagaataatagacaagtgcggaactcatagataaagtagattgaattgtggaaaattgacaaaagcttgagaagacactggggagccgccggttcttgcttggcagacatagcgttagctgtggctggcatgctagtaccgctgcgagcgacacgtagcgagagcgtgtcttcgaaaattttgttaatttttcacaattttcacaacataaatcttagtttcgtaattgcttgttacttgtataatatatgaggaggagatttatggatgagaaaaataacgtggcaaaatcccacaaggttctgcttgcaaaccgcaaaagcggtgcgttcagcggcgtagtggatgtgttgtcttttgatgttgcggagatattattagagacagaacttggaatgcttctgataaaaggacatgaccttcatgtaaaccgtctttctctggaaaaaggagagattgatattgaaggacgaattgattcactgacctattccgaggtaaaaagtgccggaaaacaggcagagtctttattgggaaggctttttaaataatgccggggaatggaggcactgttgtggcgattctgtttgagaatttggaggagacaggcagcagagtcagtgagggaatcctgacagaagcagtttttcttggaatttcgattctggtcggaatggggttgtttctgctctacgatattttccggatcttccgcagaatcgttccgcatggagcagtatggatcggcgtggaggatttcctgtactggttactctgtacagcagcagtctttctgatgctgtatcagaaaaatgacggaatgatccgtggatttgccattggtggtgtgattctcggtatgctgctttatttcgttctcatcagcaggttcgtggtgaaggtcaatgtatgtattttgaaaaaaatacttggcgttggagcaaaaatgactggttttgtgacaagaccggttcgtaaaatcagcagaaaaatcataagttttttgcgcaaacagttgaaaaaattacgaaaagtgattagaatgggtttatgtaaactttagtgcgtagattcagaggagttattcatggcaaatgtgaaaagaagacgtggaaaaaacggaaatagagcgggaagaatgtgcattacctgtatcgtatttgtattcgcaattgttatgtcaacccagatcattaaggtttatcagaaggatcaggagtatgtagcaaagcagcaggaattagagcagcaactttccgatgagcaggacagacaaaaggatttagaggactacgagacttacacaaaatcacagcagtatgtggaagatgtcgccaagagcaagcttggactgctttatgagaatgaggttgtgttcaaagagcagaagtaaaatcgaaaatacataggacgaaagatagaaaaacgggactgaaaaatcagtcccgtttttttaggaaacaaattatccgcgcacaatatcttcgatcttttgcaattcttctgcagtaaagtcggtgtgaccgatgatcttaatgttatctaagatctgttctggtttggaagcaccgatcaatacgctggttactttatcgtcctttaagatccagcttaatgccatttctgcaagtgtctgaccacgctcgccagcaagtacattcaatgcctgaatctgggcgagtttttccggtgttaaagcagtttcctttaagaaacgtccgtctgtggcaatacggctgtctgccgggatgccatttaagtagcggtttgtcagaagtccctgcgcaagaggagagaatgcgataattcctttatgaagttcataagcagtatcttttaacgcattattttcaatggtgcggtcaaagatagagtaacggttctggttaatgatgaatggacactttaagtcgtttaagatcgcggttgcttttcttaaggttggaccgtcatagttagagagaccgacataaagcgccttgccactctttacgatagaatctaaagctcccatggtttcttcaagtggagtttcagggtccattctgtgatgatagaaaatgtcgacataatctaagccgagacgtttcaaactctggtcaaggcttgcaatcagatatttgcggcttccccaattgccgtaaggtcctttccacatatcataaccggcttttgtgctgatcagaagttcatcacggtaaggatgaagttcctcttttaaaatttttccgaaattgcgttctgcacttccgtaagccggaccataattgttggcgaggtcaaaatgtgtgatgccgtggtcaaaagcggtaaaacacatctgcttcatgttttcgtaaacacccgtatctccaaaattgtgccataatcctaaagatactaaaggaagcttcaagccgctgttgccacagcggttgtaaaccatcgtgtcatatcttttttcatctgcaatatacattataaaatctcccttcaagtcgtactttatttcttaaattgtagtacaagaaatttcgcgtgtacagtgtcaaaattatatttctgtaacatatttttataagtggactacctcatcttcctaaaaaacccgaacacccttcaatcaccacaaaaagacatttgagcggaacttttggcgaaaactttttttttgcacgtcgctcctttgacaaagattttttttgacaactcctataatcgttggcacggtcgcaattagcgaaaagggtaaaaaggagattatgtcatgaaaaaaagcaaaggcagacaaatgataacgatcgcaggaggagtccttgcatgcagtatacaaatgatgggatgctatccacttgcgccagcgtattttgcggcggcatttttagaagaaataaacggcgtgtggctgaccgttgcgatgtacataggaatgctctattttatgccgctgacggcaacggtcaaatacgcggtggcgcttttagtgactgccggggcaatcaagctggtagaatgggcgaatgaagggtgcccggcatttctggcagcaatcctcactgcgatcacgacaatgatactgtctttctgtggcggattgctggaatggaaagaccagccggaagttctggcggtgtttttagaaggaatctttatatttggctcagtcattttattaaatcgtgtcatacacttttttatggaatggcaggggcgtgggaatctgaccgcgcaggagccgacagaccgcggaaaagaggagcggctttccggttacgcggagtcatttcagggactgtcacagatttttttgaatatgagcaaaaagaaggagcagtacaccgccgaggagctggggcagatgcaaaatgaactgaccggacggctctgcaccaactgtgactgctgtgcgatctgctgggaggaggattccacgccactctacggaatcctgtcaaatatgatcgcgtcaatcttaaatatcggagttccggcgaaagagagcgaggaggaactaagccattactgcaaacacagcaaagacatggtcgaggaggctgtgcgcgtgtttgaaaaggcgagtttaaaccgcgcgtggtacaaccgtttgttggaaaaccggcagacaatcgcggagcagttagatgcgatggcgtatattatgaaggactgcgcgaaagaagaaaaactgctggatgcacaggaaaaaaaggcgctggcagaaatacgctaccgggcaaaagagtgcggtattgtcattgaagaaatgcatttgtatgaaaatcagcagggacgcttaaggctcacagcaggacttcgcagtaaaatgggtggctgtgtctcggtaaaatcatttctggcagcagccacgcacgcactcggaagggatatccgggcagccgcagactgccgctcctttatctcaaaagagcgcaccgactttttgttttacgaggatacaaaataccggagcgtgcagggaatcgcccggctgaaaaaagacggcgcacagatttccggggataatttttcttttctggagttagagcgcggagatcttctgcttggactgtcggacggcatgggatccggcagtgcagcgtgcaaggaaagcgagatggtgttagatctggtggagcgtttcttggaagccgggttttcggtggagacagcaatccgcatgatgaactctgcaatggtcatgaaaggggagagtgacctgtattcgacagtggatctttgcatggtgaacctctatgacggcgaagcggatttttataagatcggtgcggcgggaagttttatcaagagggggcaggaagtcacgagtttttccccggactctctgccggtcggagttgggacaaaccctgagatcgagcacaaaaagacaagcctgaaaaatggtgattttgttgtcatggtcacggatggtgtgttagaatatctgcatgtaccaaaaccggaggaaacgatgcaggagatcatcgagagtatcaacacgaatcatccgggaatcctggcaaaaaagattttggagcgcgtgcttctttttacaggaggaaaggtttcggacgatatgacgattcttgttgcctgcatctgggaaaaatagatgacgcgggaacttttaaacgagtggaaaagagaaaaaatagtggaggcggaggatgtggtgcttgcaggagtgtccggcggtgccgattccgtctgccttttgctgctgttagagcagtttcagaagcaggtgcattttacgctggaagcagtccatgtggagcatggcattcgcggcgagcagagcagaagcgatgcggcgtttgtagaagaattgtgtgaaaaacatgggatcgtatgtcatacgttttccgtggatgtgccggattttgcaaaacaacacggcattggtcttgaggaagctgcgcgtattttaagatatgacagttataagaaagcagccaaagccgcacggagggaatttccggggaaaaaaataaaacttgcgctggcacatcatgcggaggacaatgcagaaacgattttgtttcaaatggtgcgtggaagcggaatcgacggtctttgtgggatgaaccgccgcagggtggaggatgattatgaactgatccgaccattgcttgcgcagtccagagcagacattgaagcgtttttaagagactgcggacagacttattgcacagacgagacgaatctggatactgtatacagcagaaaccgtatcagacatcaggtgctgccggaattaaagcagatcaatgagcaggcggtagtacatatcaatcagagcgcagcctttttgcaggaaatgagagattttctcgatacggaagcagacggcatttgggagatgtgcgtactggaaaaagaggatggcatacagctttaccggggcgtttgggaaaattgccacgaagtcgtgcagagtgaggtaatccgccgggcagtcgcacaggtcgccggatcgaaaaaagatattacaaaaaaacatgtggagagtgtgaaaaacctttatttttcacaggttggaaggcgcgtggagctgccgtatcaggtggtggcagagcgcaattatcgtggtattttcttaagaaaagagactggaaaaaagacggcagagcaggactttttccttgagatcccgaaggaaaaactgcagcaggttttcaaaggagaaccactcgaacttaaagtgccgggaggcaatgtcgtgttccgcggctggaacgcagacggagaaatcgcggaaattgataaaaaatcatatacgaaatggctgaattatgataaaatcaaatgtggactgcaaattcgaaccagagccgcaggagattatcttacggtggatgatgcaggacacacgaagaaactcaaggaatatctgatcaatgaaaaggttccgcgagagatgcgtgatataatgctgcttctgacagaagactcccatgtcgtgtgggcagttggtcagagaatcagcgcagactataaaatcaatgcgaacacagaaaagatattagaagtacatttttttggaggaaattatcatgaaagtcaagaatattagaaagtatctgacagaggaacagcttaccgagcgtgtgagagagatgggagcacagatcagtaaagattacggggatgagacggtatacctgatctgtattttgaaaggatcgatcttttttacctgtgaacttgcaaaaaggatcacatctccggtagaaatcgattttatgtctgtttccagttatggtgcaggcacaagctccagtggtgttgtcaagatcggaaaagatcttgatactacaattgaaggaaagaatgtccttgttgtcgaggatatcattgattccggaagaacattaagctatctgctccagaatctgaaaacaagaaatccaaagagcctgaaattatgcacattattagataaaccggaccgtcgtgtgtgcgatgtgaaggttgattatgtcggatttgagatcccagatgaatttgtagtaggtttcggattagaccttgaccagcagtacagaaatctgccatacattggatgtgtggaacttgaggacgaagaataaaggagagcagctttgaatagtaggaataatagttacagaggctttggattttatctcttgctcatcctgatcgtagttggtgtctggtatttcttagacggaaatacaacaaccaattcttatacacgggcagcttttgaaagagacatccaatcaggggatgtggcagcaattgatattgtgcagaaccgcgagatcccgaccggtagtgtcagccttacttttgcggattccacacagaaagtcctgatcgtgtcggatgtgaatgagatcgcagcttatctgcaggatcaggggatcacggattatacgatggagaatgttccggcagagagctggatcatgacattgcttccatatctgatcatatttggtgcaatgtttattttcttcatgatcatgacaaatcaggcagcagcaaatgccggcggcggtggcagcaaaatgatgaattttggcaagagccgtgcaaaactgatgcagccggatgcaaagaaagtgacgttttctaatgtcgctggcttgaaagaggaaaaagaggaattggaggagatcgtagattttctccgtgcaccacagaaatatacagctttaggcgcaagaatcccgaaaggagttctgttagtcggacctccgggaacaggtaagacactgcttgcaaaagcgatcgcaggagaagcaggcgtgccgtttttcagtatttccggttctgatttcgtggaaatgtttgtcggtgtcggtgcatcgcgtgtgcgtgacctttttgaagaagcgaagaaaaacgcgccgtgtatcgtatttattgacgagatcgacgcagtcgcaagacgccgtggaaccggtatgggcggcggtcatgacgagcgcgagcagacgttaaatcagatgttggttgagatggacggttttggtgtcaatgagggaattatcgtcatggcagcgacaaaccgtgtggatatcttagatccggcgatcatgcgaccgggacgttttgaccgtaaagtgtatgtcggtcgtccggatattggcggcagagaggagatccttgccgtacatgccaagaacaagccgcttggcgatgatgtagacttaaaacagattgcacagacaaccgccggatttaccggagctgatctggaaaatcttttgaatgaggcggcgatcatcgctgcaaaagacaaccgtgcgtacatcacacagaatgatattaagaaatcgtttgtcaaagtaggtatcggtgcagagaagaagagccgtgtcatttccgacaaggaaaaacggatcactgcattccacgaagcaggtcatgcgattttattccatgtgctgccggatgtaggacctgtctattcggtatccattattccgaccggagcaggtgcagcgggatataccatgccgcttccggaaaaggacgagatgtttaacaccaagggcaagatgttacaagatatcactgtttcactcggaggacgcgtggcggaggaacttgtctttgacgatatcacaaccggtgcttcccaggacattaagcaggcaaccaaaatggcaaaggcaatggtaacgcgctatggtatgtcggaaaacgtcggactgatctgttatgataatgatgatgacgaggtattcattggcagagatctggcgcataccagaggttatggagagggcgtggcaacagccattgaccaggaagtgaaacgtatcattgatgagtgttacgcaaaagcaaaacagatcatcacagaaaaccgcagcgtcttggatgcctgcgcagaacttctgttaaaaaaagagaaaatcagccagaaagagtttgaagcactttttgagccggatcacatccttttataaaaagcaattgcatgaaattctgctgttgcagagtttcagcagtaaaatatggaaaaacaaaaccctgcacgaaatgatcgtatcttttgtgcaggattttttttattttaagaaaactgaaaaattagcactgtaaaaaatgcacaaaaacaacttacaatttttgtgaactttgtgcacacttatttggggaatcatgatactataataaccgtaaaaaccccccaatacattatatatagtttttgctataccccatagtaaaaataccttctcctaagaggacagctgatcgacaggctgtcctttttactatgtaaaaatataagttaatgaaatattaagacacttcaaatgtgtaaagtggtatattgaatgtaggcataattttaaggaaaagaatgtaagagtggatcgtattggatcggtaatactatgatttaggagttacatactatgaaaagaatccgcccggattattacgataaatttacatgcatcgcagatcagtgcagcatcacctgctgtcaggagtggaaaataggcgtagacgcagatacaaaccggaaatggaagaagatttttccaccggaggatgtcctgccacagaaaaagaatctgagtgcctatacaacgaaaaaagacggcggacgggtgatagaactgaccggagaacacagatgtccttttttaaatgaaaataagttatgtaaacttgtgactgcatatggagacaacgtgttatcggaaacttgcgcagtatttccgagggaagtacaccgcttcgagacgcatgaggaagagacattaatgccatgctgtccggcagtcattgacctgttgcgggaagaggaaccgcagaggatttatgccggggaaaccgcacgtttttatatccgggaaaagctgacagagttatttctggatgaggactatcgtgtggaggaatccctgctctgtggattttatatcataagggaacttttcgataagtgtgggcaggatgaagaattatcagagcttgccgaagattatttttccacagaaaatcagcagcagcttcggagggcaattgcggagatagagcgtgatccatttgcaacgatggaggaacggaatgagctgttacaggatcttgccgtcaattaccggaaagagggattataccggaattatctgaacccggtcattgagaaagcggaagaactttcgggggtgtttgaaaatataggaaatccggaagatgcggcaggacagagtgcagacctgaaaactgaaatggcagacaggatgcatgcatttgaaagtgaatttcaggcatacaacccactgatgcggaaattcctcatcaatgagttcaacgcagaccttttgatgccggatggagatctggagagtctgctggtgcaatatcagtggatcgccatggagtacggtgtgatcagacacagcatttttctgcgctggctgttggatggacaaaaagagattgcatatgagacggtcagagattatattgttattatctgccgtatgacaggttatgatgaggaagatatctacgaatatctggagaacagttttgaggagctggtatgggattggggatatctcgcattggttgttggataaaaattcgggcaattgcgaaactctgagaaaacgtgaattaaattacggaaagttgacaagagcaaaagaaaacactggggaaccgccggttcttagaaggcaggaacgactgctagtcgtgactggcttcttagtaccgttgtgagtgacacgtagcggaagcgtgttttcgttaatcttgttaacttttcgtaatattcataacgtaaaattgagtttcgcaaacgttgcataaatgataacaggagaagatatgagtcaggaaaaccagaatatacaggaagaaccacacaagagacgtgtgcggtacaagggaaagtacccgaagaattataaggaaaagtacaaggagctgaacccggaaaagtatcaggatacgattgaaaaggtgatccgtaagggaagcacaccggcggggatgcatatttccattatggtaaaggaaattcttgatttccttcagataaagccgggacagatcggatttgacgcaaccttagggtatggtggtcatacaagggcaatgctggagtgcttgaaagggcagggacatatgtatgccacagatgtcgatccgattgagtccgcaaagacaaaaaaacgtctggcagaggctggattcggggaagatattttgacaatcaagcttcaaaatttctgtacgatcgatgagattgcaaaagaagccggaggatttgactttgtgctggcagatcttggcgtttcgtccatgcagattgacaacccggatcgtggtttctcgtttaaagtggatggaccgcttgatcttcggttaaacccggaaaagggaatcagcgcggcagagcgtctggcagggattggtgaggaagaattagcaggtatgctctgggaaaattctgatgaaccttacgcagaagaattagcacatgcgattgtgaccgagatcaagcatggaaagccaatcgaaaccacgacaagacttcgggaagtgatcgaggagacgttaagttttcttccggagaaagagagaaaggacacggtcaaaaagacctgtcagagaacatttcaggcactgcgcattgatgtaaataacgaatttgaagtgctttatgaatttatggagaaattgccgggagcgttaaaaccgggcggaagagcagcaattttaacgtttcattccggggaagacaaactggtgaaaaaagcattgaagcagggatataaagaaggtatttattcaaaaattgcaaatgatgttgtgcgtccgtcggcagaggaatgtgcgcagaacggcagggcaagatccacgaagatgcgctgggcagtccgggcagagtaattagcctgcaacggaagatagcagatgtacggacgaagcataatgtaatagcggagcgccgaaaacaggagaagcaggaatagaaatggaggggaattatcatgagaatatcacacattgcaatgtatgtacgtgatttagaagtcgtgaaggatttttacatccgcttttttggggcaaaagcgggcgaactgtatcacaatccgaaaacaggattgaaaagctattttttgtcatttgatgagggaacgagactggaactgatgaatcttccagaaatgcaggatcagaagaaagtgcttgtccggatggggtatatccatatcgcgctttcggtaggaagcagggaaaaagtcgatgctcttaccgaaaagctgtacgaggcaggatatgaggtcttgagcggtccaagagtgaccggagacggttattatgagagcactgtgttaggaccggaagacaatcagattgagatcacagagtaattatctgtcgttttttaccagcaccagcgcggaaattggttccacggaaacagaaccggaaacggttgaaagagcctttgttccggcggtgtctgcgctaatgcagacattccatgcgccttctggcagtgcgactgttgttctggcaggatttggattaaaaataacaaaaataccgtcagacttttcgccgtttattctgccattgatatggaaagcgagcacattttcatccagtccgtctatggaagtgatattggcgttgacatcgcgggcgttggtaagacgcagggcagcgtgagccttgcggaacgcgatcagtcccttataatattcataaacctttcgataagtttcattttccaatgtattccatttgatactattcacagaatccggggcattgtagctgttttctacaaaattgccggaagcatcgaccttggtgcggagcatttcttccccagcctgtaaaaaaggaatcccctgtgccgtcatataaataacagcagcaagattgttcatgcggatatggtcttcgcgggaagcgtccggggtgacatttgctatgcggtctaacagtgccatattatcgtggcaggatgcataattaatgctctgtgccggagtcgtgcaccagtcaccagcctgaccgagaaaacagccctttatcgtatcagaaagttcaaagccaccggagacataaccctttgtatctgtataaaatacatgtccctttaaagcatcccggagcgtgtcactgaaaaatgcaaaatctggaacaagcgtggaatttggctgtgtggtcatatgataacccggttttgtcacgtgggtgtcgagcgtccagccttctccgtagaaaatcacatccgggtgatctttgtgaactgtccggacaatttcattgattgtatctgtatcgagcagtccgacaaggtcaaaacggaatccgtcgatatggtattcatccgcccagtattttacagaatccacaatgtattttcgtaccatggaacgctcggaagcagtgtcatttccacagtcggagccgttcgaataatttccatgttcgtccatgcgggaaaaataacccggaacaattttattgacgcagaaatccactgcgctgtaaacatgattataaacaacatccagaatcacactgatctggttatcgtgaagtgcctttatcatctgtttcatttcggatacacgcaccgcaccgttataaggatcggtagaataagaaccttccggaacattgtagttttccggatcgtatccccagttaaactgtgggatgtcaggcttggactcgtccacagaagcatagtcataagcaggaagcagatgcagatgagtgatgccgagatccttcatatgatctaatccggtaggaataccggaaatggtttttgtgcctgtttctataagtcctaaaaattttcccttgttctgaataccggaactttcatcggaagaaagatcgcggacgtgaagttcataaataatagcgtcattatatgtttttccggcatttgggttggtgtccttctcccagccgtccgggtttgtggctgcaaggtcaatgaccatggcacgttttccgttgacacctgtggtgcgtgcataaggatcacaggcttcattttcattgccgcccacagatacgagataagtatagtaagtgccgtttaaatcgccctctttttcggcgatccacgttccatttacatcggcagtcatcgggagctgctccacaagatcgtctgtgcccggagtgccggattcataaaggtttaaagtgacagtgtccgcagtaggagcccacacgcggaaggttgttttttccggtgtataagtggcgcctaagtcactgccggagtaagtaaattctttttcaaattgttcggtagaataagtatttgacatttgattatcattcccttcaattagcatatatttgcaaaattttaaatcattcatatgcagcataagttctgtaatgtctcaatgattgtgattctatagaatcattttggcaaaagtgtaacatagaccgagggataaataaatatattttggataaatttttgaaaaatacgaaaaaagacgaaaaaatataaaaaagaaaaaattatgcttgtgttagaaaaaatgatatgttataatcaatccttgtcaggacatttgtgctgacaagaatgggcagattcccgagtggccaaaggggacagactgtaaatctgctgcaacttgcttcggtggttcgaatccacctctgcccattatcatatatgccggcgtggcggaactggcagacgcgcaggacttaaaatcctgttgtagcgatacagtaccggttcgattccggtcgccggcattaagaggtctcaagtgttgaagatagttcagcatctggggctttttattttgtcagaaacttaaagctggtatgtatcagggagcttcacaagttattctcagcgtaaatgaaagaaaatcgtacagacaaatatgatttcctttgtgagctttgcgaacaggaatatcatatttcgtctgcacgatttttctttttcattaacatataataagagtgtgtgaaaaccccttgatattatgggttctaaacaatcttatgctttcttcacaggtgcctgatatcttgcggttgattcacgctcgatcagtgctgcgcggagctgtgtgcggcagattggaatatgatgtatcagggagtttaaaatgacataagcacattttccaagttcactgcgttcctgccggatcgtggtgagcggtggttctaacatggaggagatcggaatgtcatcgaatccgaccacgctgatatcttccggtatgcggaaaccgcggagcttacattccgtgatgacaccggatgcgatcaggtcattgccacagatgatcgcagtagcacccgcacctaaaaaagtaggaacgtgatactttgcactgtctgccacataatagccgtaagcggtaaggtcttcattgatctcaagaccatgtgctttcatgctgttatagtaggcttcctgacgctgttcggataccatggagtgcagggaaccatttaaaaaggcaatttttttgtgaccgagtgtgtagagatggtcaactgccgcatcgattccctcatagttgtccgttccaatgtaagcaacattcggattcttcctaatataattgtcgaagagaacagtcggcatggtggtttgttctaactgtttcatccattcgtcgtgaagggcgaagccgacaagaaaggctccacagaaaccattctttaacatataggtgtcatatttttctgcgagctggaatgccggtgtgaccggaatgactgtcacatcccagttgtggcggaacgcattctgcttgaatcccaggacaatttcataaccaaactgtgtggcagcttcatagtccatattttcaatgaaaatcgcaagcttgcggttttctactttttttgatcgtttggtcgcatatcccatttccactgcggtatctaagaccatctgtcttaattcatcactgatatcgcttgctccgttcaaacctttggagacagtgctgacggatacacccagacgatttgctatatctttgatcgtagccaagtctttatcctctttgttattattattcgatacttcccttattatatagaatcgaatttctgttttcaagcagtctgctcagagatttcaaaaaagtttcgaaacaaaacgagaaaaacttgtcattttacacaaaaaaacgaatataaaaacgtgaaaaatagcaaaatcgatattaatatttgcaaattcgttgacaaaaacgtttccatgaactaaaattacctcagatacgaaaattcacgaaacaattcgtacaggttttgaatgcgggatcattccaacagaacgggaggaaatgaattgggatcaaaagaattgaccaggggagcaggagtcctgctggcaatcacaagcttaccatcttcatatggaataggaacgttaggggaagctgcattccaatttgttgatttacttgtcgatctcaagcagaggtactggcaggtgcttccaatcggtcctaccagttttggaaacagtccgtatcagtcctattccgcatttgccggaaacccatatctcattgatctggatgatctggtgaaggatggattgttacaggagacggaaatccgcagttttaactggggaacggatgatgcagatattgattatgcaaccatctatgagaatcgttacaagattttgcgaatggctttttcgagattttctgcggagagtgaagacttccttgcttttgcagaaaaaagcgacagctggctgtctgattattctctttataccgcattgaaacggcattttggagacatagaatggcagagctgggatgtgccgctcagggacagagatccggaggcagtgaaagagtatcaggaaatattacataatgacatcatgttttgcaaattttgccagtatgagttttttaagcagtggatgcagctgaaacagtacgcaaacagccgtggagtccagatcatcggtgatatgccattgtatgtggcgtcagacagtgtggatgtatgggcgcatcgtgagatgtttttactggaaccggatggaagaccgaatgtggtcgcaggggcagcacccgatgcattttccgagagcggtcaggtatggggcagtccgatatatgactggagcgtcatgggagaggatagttttgcatggtggaaggcaagaatgcttgagaacatggaattatttgatgtgatccggttagaccatttttccggtctgatccgttattacaccgtttccgcagatgcagaagacggaagaaatggcaagtggagcaaagggccgggcaggaaactgacagatgccatgacagaggttttgggtgatatgcgggtgatcgtggaagacatcggaccaaagggcgggcttccgggagtgaaaaagctaaagacaaaaaccggatggccgggcattaagattttaatgtttgcctttgatgatgacaccgctaatgagcatctcccacataactatcaggacacaaatatggtcgtatatgcaggaactcatgacaatgaaacgatcgttggttatttccgggataagtcagattacgagcttgcatatctgtatgagtatctgaacattcattataaagaagaaataccggatgcattgatccgggcagcctatgcaagtattgcagatgtggcaattatccagatgcaggatctgatgaaacttggaaatgaagccagaatgaacgcaccttccacggtgggatgtaactggcgctggcgtatcggaaaagatactctgagcgaagaacggagagcatggatacggactctggcagccgtataccgcagataacaaatacgctataagatgcataagcattttatatagaagtcttattctaaaaaaggagaggaatcaaatgaaaaagaaagcaatctcattattacttgttgcagctatgacagctacaatgacagcaggctgcggcgacaaacaggaagcagcagacaacacaactgcaggaaacgatgcggcaccttctacagaagcagcagcatctgatgatgcagcagcagaagaagaagaggaagcatggagcggtacattgactgtatggagcccacaggaagatcaggatacaggctggttacagaaagaatgtgacgcattcaatgcggctcatccaaactgggatgtcacatttgagtatggtgtatgcgcagagggtgatgcaaaatctactgtcacaacagacgttgagggatcagcagatgtctatatgctggcaaacgataacatccctgatttagtagcagcaaacgcacttgctgagctcggcggatcttatcttgattatgtgacaagcacaaactccgattccattacagcatctgttacatacaatgatgcagtagtagcattcccattcacatccaatacatggttcatgtactatgacaagagtgtattctctgatgaggatattaagagctttgatacaatgttagagaaaggaaaagtttccttcccattatctgattcctggtacattcaggcattctatgttggaaatggctgttcattattcggagatggtacagacgcagcagcaggtatcgacttcgatggagaaaaggcagcagctgttacagattacttagttgatgtagttgcaaatcctaactttatcaatgatgcagacggagctggtcttgcaggtttacgtgacggaagcgtaaacgctgtgttctccggtacatggaatgcagaagctgtaaaagaagcacttggtgacaatatgggtgttgcagcacttccatcatttaacttaaacggaacagactgccagatgaaatctttcatcggatctaaagcaatcggtgtaaacccaaatgctgagaacatgcaggttgctatggcactggcagcttaccttgcaggtgaggacgctcagaaagatcactacgatatgagaaacatccttcctacaaacacaaacattgcagttgatgatgagatcgcaacagcagttgcagacgtaatgatcaacacatctatcatgcagccattagtatctgagatgggtaactactggtcaccagctgagaatatgggtaaagcacttgtagctggcgagatcacacatgataacgcagcagaaaagacagcagatatgaacactgcaatgaacacagacgcagcacagtaaaaaggatacagaagattcttacatgcaaaatacaaacctcggggcgcataagcgctctgaggattgtttgatactaaggaatccatttttattttaaggaggcccataacgtgataaaggctggaaaaagaaaaaaagagtttacggatccatataccgtgaccggtgcggttacaaaaggaaatatcattacaaagctttccctgcttattatgggcttgggtaatatcgcgcacagacagattgcaaagggactgatgttcctggttattgagattggatatatatggtttatgatccaatccggaatttataatttatccatgtttccgtcattgggatggagagagcaggaaaaagtctggaatgaaaagaaaagtatctatgagtacactgccggtgatcagtcatccctgatcctgttgtatggagttgcaacgatttatattacattgatgtttatcgttgtgtggagagaggcagtaaaaagctcttataaatcagaagtgcttgcaaaatcaggaaagcacctgaacacctttaaagaagacttcaagagtttgtttgatcaaaatttacataaattattacttgcagcgccgatcatgggagtattgatctttacgatccttccactgatctataatatttccatggcatttaccaattatagcaaggtaaacgatcatctggtattatttgactgggttgggcttgcaaactttgcaaaaatcttaaatttgaacgacagtatcggtaagcagttctattccgtactgacatggacgatcacctgggcgatttttgcaacagcattaaactatatctttggtatgatccttgcaatcgtgattaaccgtaaagagacacattttaagggtttctggagattctgctttgtattatctatcgcagtacctcagtttgtttccctgctgatcatgagaagtatgttacagccaaccggtatcgtaaacactttattattaaaatatggtctgatcgatacggcgcttccgtttttctcaagtgcgacatgggccagagtgacggttatcgtgatcaacctgtgggtaggtatcccatatacgttacttcaggtaacaggtattttacagaacattccgggtgaattatatgaggcagcgaagattgacggagccaatgcagtccagatattcttcaagatcacattgccatatatgttatttgtcatgacaccatacctcattacacagtttaccggaaatatcaataacttcaacgttatctacctgctgtccggcggtaatccgacaccggtggatgcaacagccggtaagacagatctgcttgttacatggctgtacaaactgaccgttgataagaactactacaacttaggtgcagtaattggtattatgacgttcattgtccttgcgatcgttgcgctggtaacatatcgtaataccgcatcctacaaagatgaggagggattcatgtaatgagtaaaaaacaagtgacatctggcacaaaagcaaagaaaacaattgtgaatattattatccatatttttctggcaatcctgtcattcatctgggtgctgccgattttctgggtaatcctgacaagcttccgcggtgagaaaggttcttacgtaaccactttcttcccgaaaacttatacgatcaacaactatgtgaaattattcacagatacaagtattttgaactttccgaaaatgtttatgaatacttttatcattgcgatttttacatgtatcatttcaaccatttttgtactttcagtatcttatacaatgtcaagaatgcgttttaacatgagaaaaccatttatgaatatcgcaatgatcctcggattgttcccatcttttatgtctatgatcgctgtttactatattttaaaggctcttggactggcagagggatctatgatccgtatcgctttgatcgttgtgttctcagcaggatccggtgttggattctatgttgcaaaaggtttctttgatacgatcccaaaagcactggacgaggctgcgattatcgatggggcaacaagatggcaggtatttacgaagattaccgtgccactcagtaaaccaattattgtttataccattttgacatccttcatgggaccgtgggtagacttcatttttgcaaaggttatctgccgtgctgatgcacagtactacaccgtgtctatcggtctttggaagatgcttgaaaaagaatacattgacagctggtatacctgttttgccgcaggcgcagttgtggtatccattccgattgcaattctgttcttactgacacagaaattctatgtagatggaatgagtggagctgtaaagggttaacccgggcagcggataagttttggctgtgtgtgggactgttgtatgagagtgaaaatcttgatacagcagtccctttttatgcgaaaatagagttttacaattaattgtttttatatataataatcgttagtataggtaatcgcgaaactcataaaataagtagattaaattgtgaaaaattgacaaaagcttgagaagacactggggagccgccggttcttgcttggcaggcgtagcgttagctatggctggcatgctagtaccgttgcgagcgacacgtagcggaagcgtgtcttcgaaaattttgttaattcttcataattttcataacttaaatatgagtttcataattgatcgtaaggagaaaagcatgagaaaacgttttataacagtctttttagcgggactgatgttgatacagaccgcagcgtgtggaaataacacaggcgtggcagcagggaatgtggataacaccgaggcagtggcagagagccagaccgaggcagatacagaaaaagaagaaaacggagtgaccgcattatctctgatgcagcaggtcaatacggcagatgaaaatgtcattgatgataattaccgtacttattatgaggtgtttgtttacagcttttatgacagtgacggagacggaatcggcgatctgaatggattgacggaaaatcttgattacattaatgatggagatccaacgacggacacggatctgggatgcaatggtatctggcttatgccggtcatgccgtccacaacatatcacaaatatgatgtgacagattatgaagcaattgatccagagtatggtacaatggatgattttacgacacttgtagatgagtgccataagcgtggaatcaatgtgatcatcgattttgtcatgaaccacacatcttcacagcatgagtggtttcagaccgcgtacaaatatttgcagagccttccggaaggtgcagaaccggatgcgtcagagtgcccttatgtagattattataatttttccaaagaaaaactgggcggttattatccggtggaaggaaccggctggtattatgaaggacagttctggagcgagatgccggatctgaactgggataatgaaatgttaaagacagagtttgagcagatcgtacagttctggctggatctcggagtggacggtttccgtctggatgcagtaaaggaattctattcgggcgcagatgataaaaatattgcagtcctgacctggtttaatgatatggtgaaatccaaaaaagaggatgcatatctggtcggagaggcatggaatgattacagtgtctatgcgaaatattatcagagcggcatggacagtttctttgattttacttttgcggataaggacggtatcattgcagacactgtaaagggaatcaatggcgcttccgcttacggaaagggtattgtcaatacgcaggaactttatggcagctacagtgatacttacattgacgcaccgttttacaccaatcatgatatggcgcggagtgcaggttactattccggcgattacagtgaagcacagacaaagctcggaaatgcaatgaatcttctgatgtccggaagtgcatttttatactatggggaagaactcggtatgaaaggctccgggaaagatgaaaataagcgtgctccgatgtactggtcgacggatgccgatgccacgggtatgtgtgacggaccaaaggatatggacgatgtcaaaatgaaatatggcagtcttgaggagcaggaaaacgatggcaattccatctataactttgtgaaacagacgatcgcattgcggaatgcgtatccggtgatcgccagaggaaaggtcgcatttgatgaggggatttcggatgatacggtatgcgtgatccggaaaacctgtgatgagggacaattgacgctggtgttcaatacttcagagaaggcacagacggtcgattttggaaaatcagctctcggagcaacggaagacaggaaatatccattgcagatcgccggggagcttctgacaggaacggaagctgccgttctggatggagaacagcttaccatacctgcgtattcggtcgtgatcttagagtaaaaaagaatacttttccggatagcagaaatccccgatatgagagaatctatcggggatttttacttgaatctgtggttttttggtatataatagtaatatcaaagacggaaaatgcaggtattgcgaaaatgcgtgtgtttaagagaaaatctggaggaacaatagatgaagcggaaagtcagaacaagaaagctggggatcaaatttaaaatactgatcccggtatgtgtatgtgtactcgttgtctgtgtggttatgggagtaaattcttacaaacatatccaagacggcatggttgagatgggcgttcaggaggcagacatggcggcagatctgacacttcgtatgttagatggcgacgaggtggagcagattgttccgggggcagaagaaagcgatgcatataaaggagttctggcagctttaaaaaatatgaaggacagctgtgggatcgcatatctgtatactttatataccgatgggacgaatgtttattacggagtagatgtggaagcaaccgaagatgtaagttatctcggggatccttttgctgactcttatgaggagttaaaatctgtatttgaaggacaggaatatgtgcaggattatattgatgagactgaggatggcgacctgatcacagtctacaagccgatcacaaacagcgcaggaaaagtggtggcagttctggggtgcgattatgatgcatctgatattactgcccggcttgaggcatcacttgtgggagtggtcaagattggtgcggtctgcattgtcctggcagcagcggctctcagtatcattatttcaacgatcacgagaggtcttcagaaagtggacgacaagatttatgagatcgtgcataacgagggagatctgacacagaagctggacatccacagtggagatgagatggaactcattgcagggaatgtcaatgctttattggaatacatacggggaatcatgttgaagatctccgacaattcagaacatttaaatggttcgtcacaaaagatcgcacaaaaccttgcagcagctgaggtgaatatcactgacgtttccgcaactatggaggaaatgagtgcggcaatggaggagacaaacgcttcactggagcagatcagcacctcagtgggacaggtttatgcatccattgaaaacatggtagcacgtgcagagcatggaaaagagtcttccggtgaaatgaacggacgggcaggcagtgtccgcacagaagccttaagcagacagcaggaggttacaacgcaggtggccgacatggcacagaaattgaatgagaagatcgagcagtcccaagcggtgcaggagatagcacagcttacgacaaatattattgagatcacagatcagaccaatctgttggcattaaatgcgagcattgaggcagcaagggcaggagaggcaggaaaaggatttgcagtcgtggcagatgaaatcggaaaacttgctgccaattcggcagaagcagcagaacagatacaaaaagtgagcgcagcggtagttgaggctgtgaatagtctggcacaagaggcagaaaatatggtcgaatttgcgggaataactgctgtggatggttatcagcagttagtggaaatgagtgagttttacagaaaagatgcaggtgatatgaatgccgttatggaagatttcacaagtgctgccggcgaattgcagaaagccatggatgagatcaaagaatcaacgacagcagtcagtgcagctgtcgaagagagcgcaaagggcattgtgaatgtggcagaaatgtccacagatcttaccggaagtgtcggcgatatccagaaggcggcagatcataacaatgagatcgcagatatgcttgatactgaggtgaaacgtttcaaattggaataaaagaaaaaatcgctcagacctcactcatggtctgggcgattttctgttagggaaattttttacagtcccttttatcgtttacacttcgtcgcagcttccacgaatccatggaacagcggatgtggtctgttcggtctggatttcagctccggatgtgcctgtgttgcaatataccaaggatgatccggaagttcgatcatttccacgatacgtccgtcaggagaagtaccgcagagtttcatgccatgctcaactaaagtggcacggaaatcattgtttacttcataacggtggcgatgacgctcttcaatattttcagttccatacaattcatatgctttggaagttttatccaaaatacatggataagaaccaagtcttaaagttccaccgatatcttccacaccattctggtcaggcattaaggcaatgaccggatgtgttgtgttcggatcaagttcaacgctgtgtgcatcattaaatccacagacgtgtcttgcaaattcgataatggcaacctgcataccaaggcagagaccaaggtaaggaaccttatgctcgcgggcgtattgggcagcaaggatttttccttctacaccacgggaaccgaagccaccaggaactaaaatgccggaaacatcacctaaatattcgtctacattttcaggagtgagttcctcagaatcaacccatttgatattgacagttgcgtgctctgcgattccgccgtgttttaatgcttctacaacagagatataggcatcgtgcagggcaatatattttccgactaatgcaatctttacttctttgtttgggtggcggagcgcatctaccattgcttcccagtcttttaaatcaggttctgggcaagctaaatgtaaagcttcacaggcaacctttgcaagattttccttttccattgcgagtggtgcctcatataagtattccacgtcaaggttctgcaatacatggctgttcggtacgttacagaacagggcgattttatcttttaagctctggtctaattcgtgctcggaacggcatacaataatatcaggctggattcccattccctgtaattcttttacagaagcctgtgttggctttgttttcaattcgccggaagcctttaaataaggaatcagggttacatggatcagaatggcattttcatgtccgacctcatgctggaactgacggattgcctccaagaaaggctggctttcgatatcacctacggttccgccgacttcgatgatagcgatatgtgtttcatccgaagtgaaattgcggtaaaaacggctcttgatctcgtttgtgatatgtgggatgacctgaacagttcctccaccgtaatcaccgcggcgttctttttgcagaacggaccagtaaacttttccggttgttacattggaattttttgttaagctctcatcaatgaaacgttcataatgtccaaggtcaaggtcagtttcggcaccgtcatctgtgacgaaaacttcaccgtgctggatcgggttcatggtacctggatcgatgttgatgtaagggtcgaatttctgcatggtaactttgtatccgcgcgcttttaaaagtcttccaagggaagcggctgtgatacctttaccgagaccggatacaacaccaccggtgacaaaaacgtattttacaggcatagggttatcctcctctaaaaaagtgaaatatagtaacaaaatcctcttagtttgtatcatagtaatgataagctgcggtaagcagcaaaaacattacgcaatttttttaactgaaatagtatactactatgtttttctaaaatccataaaaaaataaaaatttttcatggtaaataagtggaagtttataaaatctttagaaatgaaaggaaaacttcacgaacaatgtattgcttttaggcactaatttcaatataataagtaagaattgtgattgcaggacacagcatggatgatgttgtggtgagcataaaaaggattcaatacgataagtccggtcagacgaatgactgactgtggaaaggatagatttatggataaccagagcaattataataatggcaataacggatacggcggcggaggctacggcagcggcggtccgggcaataataatggaaacaacggaaataataataatggcaataatggtaacaataataaggacaataaaaatggccagatgatcatggtgtttatcttagtgtcgttagtggcactgttccttatgagcatggtcatgaaccggtacacttcaatgagcacatcggagatcagttattcagattttcttcagatggtagaggacggaaaggttgagtcagtagaatttgattcttaccagatcaatatcacaccggtttccgagaacaagaacccatatctgcaggaacagacgtattactgtggacggttggatgacccggatctgcttccgttactgaaagaaaaaggaatcacgatctcaagagttattccggacaacacatccacctggatttataatattttaagctttttacttccattggttttaatctggattcttatgggagttctgatgaagcgtatgggcggcggagccatgggggttggcaagagtaccgcaaaagtttatgtggaaaaatccaccggtgttacttttaaagacgttgcaggacaggatgaggcgaaggaatctttgcaggaagtagtagactttttgcataatccgaagaagtaccgtgagatcggtgcgaagcttccgaagggagcattgctggtaggacctccgggtactggtaagacattgctggcgaaagctgttgcaggagaagccggagtaccatttttctctctggctggttctgatttcgtagagatgttcgtgggtgtcggtgcatcccgtgtgcgtgatcttttcaaagaggcacagaaacaggcaccgtgtattattttcatcgatgagatcgatgcaatcggtaaaagccgtgattcccgctatggcggtggcaatgatgagcgtgagcagacattgaaccagttactggcagagatggatggttttgatacttccaagggacttttgatcttagctgcaacaaacagaccggaagtcttagacaaagcactgcttcgtccgggacgttttgaccgtcgtattatcgtagataagccggatctgaagggaagattagagaccttaaaggttcattccaaagatgttctcatggatgaaaccgtagatttggatgcgcttgcacttgcaacggcaggactggttggttctgaccttgcgaatatgatcaatgaggctgctatcaatgcggtcaagaaaggcagaaagtatgtcaatcaggcagacctgtttgaggcgtttgagttagtcgctgtcggtggtaaagagaagaaagaccgtgtgatgagcgataaagagcgcaagatcgtttcttatcatgaagttggtcatgcgatcgtgacagcacttcagaagaatacagaaccggttcagaagatcacaattgttccaagaacgatgggagcactcggatatacattacagacaccggaggaagaaaagttcttacagaccaaggatgagctgctcgcaaagatcacaacctacatggctggacgtgcagcagaagtactggtattttcttccgcaacaagtggtgcagcgaatgatattgagaatgcaactgcgatcgcgagagcaatggtaacacagtatggtatgtcggataagtttggtatgatgtgtcttgcaacaacagagaaccagtatctggataaccgtgcaggactgatctgtggcgaggagacagcagcgcagatcgacggcgaagttctttcgattattaataaatgttatgatgaggcaatgcagcttctgatcgagaacagagagtcgttagataagatttcggaatatctgtatgaacatgagacgatcaccggaaaagaatttatgaagattttccgcgagatcaagggaatcccggaaccagaggaagaaagcggcaaaaagagctttatggaacaggcgatggatgcagaacgccagagcacaggaagccatatagattataaagcagatgaaaacacacagacaagcaatgatggtgaataatgtttgatattgcagaagaattaaaaaaactcccggatcagccgggagtttatattatgcatgacagcagagatgcgattatttatattggaaaggcagtcagccttagaaaacgggtgcaccagtattttcaggcaagccatgatgagggaatcaaaaaagcgcagatggtcagacagattgcgcgttttgaatatattatcacggattctgaactggaggcacttgttttagaatgtaatctgatcaaggagcacagaccgaagtataacacaatgctgcgggatgataagacctatccgtatatccgggtgacggtaggagaggatttcccgcgtgtccttttttccagacaacagaagaaggacaagtcgcgttattttggaccatacacaagcgcaggcgcagtcaaagatacgatcgaactgatcaataagttatatcagttacggacctgtaaccggaatttgccgaaagatattggaaaagaccgcccgtgtctgaattatcacatccaccagtgcaatgcgccatgtcagggatatatcagcaaagaggaataccgggaacgcgtgaatcaggcggtggaattcctgaatggtaattatgctccgatcttaaaatcccttcaggaaaaaatgatgactgcatccgaagaaatgcagtttgaaaaggcagttgaataccgggatctcttaaacagtgtaaaacagatcgcgcagaaacagaaaatcacccataacgacggggaagacaaggacattatcgcgcttgcttcagatgaccgggatgcggtggtgcaggtattttttatccgggatggaaagcttatcggacgggatcatttttatgtaaagatcggaacagaggatacgaaggaacagatactaactacatttataaaacaattctattccggcacgccgttcattccgcgggagattatgctcccggaggagattgacgaccacgaagtattggcagaatggcttggagagaagcgtggaggaaaagtttacatccggattccacagaagggcatgaaggaaaaactggtcgaactggcacagaagaatgcggagctcgttttatcacaggataaagagaagatcaagcgcgaggaaggaagaacgatcggagccatgaaagagattgcaggctggctggatcttccgggtttacagcgcgtggaggcgttcgatatctccaatatcaatggatttgagacggtgggttccatggtcgtttacgaaaaaggaaagccgaagcgcagcgattacagaaagttcaaacttcgcactgtcacaggaccggacgattatgcttccatgcatgaggtactgaccagacgtttcacgcacggtatgcgggaacaggaagaaatgcaggagaaagatcttggcgaggaatatggaggttttacccgtttcccggatctgattatgatggatggtggacgaggtcaggtgaacatctgcctgaaagtacttgaggaacttcatctgaatatcccggtatgcggcatggtaaaagatgataatcacagaacccgtgggttatactacaataatgtcgagataccgatcgacaggagcagtgaagggttcaagctcatcacgagagtgcaggatgaggcacaccgtttcgcaatcgaataccacagatcactgcgcagcaaggaacaggttcattccgttttggatgatattccgggaatcggaccgtcccggagaaaagcgctgatgaaaaaataccagtcgctggatgcaatccgggaagcgtcggtggaagatcttacagatacggaaagcatgaatgaaaaagcagcacaggcagtctatgaatttcttcacaaagacgctattctatgatatattgtaactaatatttccaataggtaactgcaaaatgcgagagcagagactatgttttgcaattgcccaaaacataaaggagaaaagggtatgaatggaacgaatggagtaagtgtcagcaaagtagcacagatcatggatctgtataattttctgccggatatggatttaaaggcacatcgtattaaaatcagtgatgtgaaccgtccggcattacagttgagtgggttctttgaacattttgagcagtcgcgtgtgcagatcatcggtaatgttgagtacacctatctgcagagactggatgtagagaagaaagaaaaagttttaaaaaaatttaccgcatataatatcccatgcattattttttgcagggatttacagccggatgatgatttcttacgcattgcttctgaaaacaatgttccggttttaggaacgaagagaagcacttcagaatttatggcagaactgatcttctgtctgagtgagcagttagcaccatgtatctccattcacggagttttggtggatgtttatggtgaaggacttctgatcatgggtgagagcggaatcggtaagagcgaggcagcattggagcttgtgcgacgcggacaccgtcttgtaacggatgatgttgtggagatccgcaagatcaatgagcatacactgatcggtacatccccggatatcacaagatactttatcgaagtgcgcggtatcggaattattgatgtaaaagcactttatggtgttgagtgcgtcaaggaaaaacagcagatcgatctcgtcatcaagttagaagactggaagaaagaaaatgagtatgaccgtcttggcttagaggatgaatatgcagaatttcttggaaataaagtggcatgccattcacttccaatccgtccgggacgaaatcttgccgttatctgtgagacagcggcagtcaaccacagacagaagaaaatgggatataatgcagcacaggagctttaccgccgcgtgcaggagaatatcacaaaaggtcatgatgatgacgattaagctgtgtatacacgattgtgctgaaagcagacggcacaggacatagttacatttttgcatatagcggaacaaccgttataaatatatagttagatttggagacagaattatggaaaacaaaattgcatgggaaaaatatccggaaggaaataagcgcgaggaagtattccagttcgcagaggactaccgcaagtttatttcggagtgcaagacagagcgcgaatgcgttacatcttttgcagagaaagctgaaaaagcaggctttgtaaatcttgagaaagtgatcgcagagcacactgcattaaaagccggtgacagagtatacgccaacaacatgggaaaaggcatggctctatttgtaatcggaaaagagagcatggagaagggaatgaacatccttggagcacacattgactccccacgtcttgatttaaaacaggacccattatatgaggatactgattttgcaatgttagacacccattattatggtggaatcaagaaataccagtgggtaacactgccattggcattacacggtgtcattgcgaaaaaagacggaacagttgtgaaagtaaacatcggtgacaagccgggtgatcctgtttttggtgtgagtgatcttctgatccacttatccgcagagcagttagagaagaaggctgcaaaggtgatcgagggagagaatcttgatcttctgatcggaagtattccaatgcagaccgaagatgaaaaagtaaaagaaaaagtaaaagcgaatatcatgaatcttttaacaaaagaatatggtatagaggaggaagatttcctttccgcagagatcgaagttgttccagccggagaggcaaaggactatggctttgaccgcagcatgatcatgggctacggacatgacgacagagtatgtgcatatccttcctttgaggcaatgcttgtgacagagaaccctgaaattacaagcgtatgcctgttagtagacaaagaggagatcggaagtgtcggcgcaagcggaatggagtccagattcttcgagaatacagttgcagaggtgatgaacgctgcaggaacatattctgagttagcactcagaagagctttggcaaattccaaggtactttcatcagatgtatccgctgcatttgatccaaacttcccaagtgtcatgacaaaacgcaatacagcatattttggaaaaggacttgtattcaacaaatacacaggagccagaggaaaatcaggttccaatgatgcaaatgcagagtatgtcggcaaattaagaaatatcatggattccaatgatgtttctttccagacggcagagcttggtaaagtagaccagggcggcggcggaacaatcgcttacattcttgcaaattacggaatgaacgttatcgatagcggtgttccagtattgaatatgcatgcaccgtgggagatcatcagcaaggttgatctttacgaggcatacagaggttatattgcattcttaaaggaagcttaggaattataaatgaacgatcattttttaacagaacttaaaaatgtaacaggtgatttgggtatctttttaaaagagcctatgaaaaaacatacaacgtttcgtgtgggtggaccggcagatgtgctggtctgcccggatgagacggcacttgccgcagtccttggactctgcagacagtatgacgtgccatataccctgatcgggaacggcagcaatcttcttgtgggagacaggggaatccgtggtgtggtcatcgagatgacagagccgatggctgccattgaagtaaatggaactaagatcacggcacaggctggcgcaatgctttccaagatcgcaaataccgcagcggcaaatggtttaggcggcatggaatttgcagccggcataccgggaagcgttggcggagcagttgtcatgaatgcaggtgcttatggcggcgagataaaggacatcattgaaaaagcgtatgtgttagatgagaacggaacacagttagaactttcgaaagaggagctggacttaagttaccggcatagctgtatcccggagaaaaaatatattgttacaaaagttgttttggaactgcagccacaggatgaggcagtgatccgttccaaaatgaaagaattaagtgaaaaaagagcagaaaaacagccactgcagtatccaagtgccggaagtacattcaaaagaccggagggatattttgcagggaagctgatcatggatgcagggctgcgcggctatcaggtaggtggagcgcaggtctctgaaaaacattgtggttttgtgatcaacaaaggggaggcaacagcggcagacatctgcaggctgatgcaggatgtgtcagataaggtacaggcacagtttggtgtagtattagaaccggaagtgaaaatgattggtgaattttaagctgcaaacttatgagaaaggtgtggttatagtatgaaattcgtgatattaacaggaatgtctggagccggaaaaagtacagcactaaaaatgatggaagatatcggcttttactgtgtcgataatcttccaatccctttactggaaaaattcgtggaattgtctgatctgcagcagaatgcagaattacagaaagtcgctgtcgggatcgatatccgaagtggacaggcacttgaggaacttcggagtgtgcttgaccggatcaaggcaaacggcggcgcttatgatatcttatttttggatgcggaggattctgttctggtaaaacgatacaaggaaaccagaagaagccacccattggcaggatcggagcgcgtcgataagggaattgcaaaagagagagaaagacttgcatttttgaaggaacgtgcaagttatattatagataccagccagcttctgaccagagaactgaaagcggagattgaaaaaatatttgtgcagaatcaggattataaaaatctgttcatcacgattttatcgttcggatttaaatatggaatcccggcagattccgatctggtttttgatgtgcgtttcctgccaaatccatactatgtggaaggactgcgtgccaagacaggaaatgataaagagattcaggattatgtgctccagtttaaggaggcgcatgagtttttggataaattagaggatatgatcaattttctcataccgaactatattgcagaggggaaaaaccagcttgtcatatcgattggatgtacaggcggaaaacaccgttccgtaacgcttgccaatgaattgtacaagagaatggcggacaagaaggaatatggtttgaagattgaacatagggatataggaaaagatgccctgagaggtaaatagaatgtcattttcaagtgaagtgaaagaagaactttccagacatctggggaaaagccgtcactgccagatcgcagaactggcggcattgatcgcatttgacggaaaagtgcagataagtgagtccggatgtgatctttttctggattccgaaaatgaacttttgaacacaaagtatgaacttttgctgaaaaaactttttgatttttgcaatggggaaaaagaggaagcagaaagaaggcagcagaaaatctatgagacagtcaaaatgtgggatgaggatcaccagatcccgatgatcacggagactgtgaatggattgctgcttttgcagagctgttgtaaaagagcctacatcagaggcgcttttcttgccggcggctcgatcagtgatccgaataaatcgtatcattttgagatcgtgtgcagaacagagccacaggcggagcagctgcgtgacacgatcaacagttttgatatggacgctaagatcgtggaacggaagaaacattttgtcgtatatttaaaagagggtgctcagatcgttgacattttaaatgtcatggaagcccatgtggcattgatgaatttagagaatgtgcgcattttaaaagagatgcgcaattccgtgaaccgaaaagtcaactgcgagactgccaatatcagcaagactgtgaatgcagcagtgaaacagctggaagatattacatatataaaagaaacatcggggttagacagtctgccggacaatttaaaagaaatagcgttattgcgtcttgattatccggaggcaccactcaaagaacttggaacctatttagatccgccggttggaaaatcgggtgtgaatcacagacttcgcaagatcagtgaaatcgcagagggattgagaaaataaggaggagaaggagagacaatgaaaaagacagtagaagtgcagatgggtgcaggaatggaagcaagaccgatcgcattaatggtacagaccgcgaatcagttttccagtcatatctatctggaaatggatcaaaagcatgtcaatgcaaaaagcattatgggaatgatgagcttagtgcttacaaacggcgcgacagttacgatcaatgcagaggggacagacgaagtggaagcagtgaatgcattggagcggtttttaatcggaaaataaaaggttttagaaataagagagtatagatttatatgggtatgaaaaagaaattattatttgtattcaatccgtgctcaggaaaggcacagattaagaatcagttgttagacattgtggatacgatggtaaaggcagactatgaggttaccatatacccgacacagtatgcgggagatgcaaaagaaaaagtggaagcgcttgccggcaattatgatcttgttgtgtgcagcggtggagacggtacgttagatgaagcggtaaccggaatgatgcaccgtgagacaaaagttccattgggatacataccggccggaagcacgaacgattttgcttcctcgcttggaataccgaaggacatggaaaaggcggcagaggtggccgtcacaggaaaaacgtttccgtgcgatgtcggtctgtttaatgaggattattttgtctatgttgcagcatttggactttttacagaagtgtcttataagacgagccaggaatggaagaatgtacttggtcatgcagcctatattttagaaggagcaaaatgccttcatgatatcccgtcttttatgatgcaggtggaatataacaatatgcgtattcaggacgaatttatttacggcatgatcacaaattctacatccgtaggagggttcaagggaatgaccggcaaagatgttctgcttgatgatggcgtctttgaagtgaccttgatcaaaaaaccgaagaatccaatggaactgaacgagatcatcgcatccctgatcaatctggtagatgatacggaaatgatctattcttttaagacagataaagtgaaattcacatcgtcgaaacagatcccttggacgctggatggcgaatttggcggagaccataaggaagtctgtgtgaaaaatctgaaacaggcagtggatattatagtcaaaaagccggaagaataagagatttgtctgtgatatctgttaaaaaaataactttattttttgagtaatctaatatataatgagtgcaagtgagaaaaatacaaagaaatttgtatttggcgaacgacgaagttactgagtgatgaaatcacgaggtaatgagtgcaaatgggaaaatatattttataattatggaggaattaacaatgttagtatctgcaaaagaaatgttagacaaagcaaaagctggtcattacgctgtaggtcagttcaacatcaacaaccttgagtggaccaaatccgttctgttaacagcacaggaattaaaatccccagttatcttaggtgtatctgagggtgctggaaagtacatgacaggattcaagactgtagcagctatggtaaaagctatggatgaagaacttggaatcacagttcctgtagcattacacttagatcatggaacatacgaaggatgctataaatgtatcaaagctggtttcacatctatcatgtttgatggttctcattacccaatcgaagagaacgttgagaaaacaaaagagttagtagcagtagctcatcagttaggtttatctatcgaagctgaagttggttctatcggtggagaagaagacggtgttgttggtatgggtgaatgcgctgatcctaacgagtgtaaagcaatcgctgatcttggtgtggacatgcttgcagcaggtatcggtaacatccatggaaaatatcctgcaaactggccaggattaagcttcgagacattagcagcagttcaggagaaaacaggtatgatgccattagtacttcatggtggtacaggtatccctgccgatatgatcaagaaagcaattgaccttggtgtatctaagatcaacgttaacacagagtgccagttatctttcgctgatgctacacgtaaatatattgaagctggtaaagaccttgaaggtaaaggattcgatcctcgtaaattattagctccaggtgctgaagcaatcaaagctactgtaaaagagaaaatggaattatttggttctgttggaaaagctgaataagcatattttcagacgaacagatgacttaaaaagagcgttttccgtatggaggcgctcttttgaaatttaagataatagaatgtgcgctttgcgaacattctattatttattagttgcatttatgtgtagattctcttatattagtataagaacatcaaatctgaggggatttagatgagagaaaggatatcaaacaagatgatggagaaagagaactttaatgttgtagatatctttggagaaaatgtattcaacgattctgtcatgcaggctcgtttaccaaagaaagtttacaaaaaacttcacgaagtaatggaggaaggaaaagaattagacctcgagaccgcagatgtcgttgctcatgagatgaaggagtgggcaattgaaaaaggtgcaacacattatacgcactggttccagccgttaaccggagttacggcagagaaacacgattctttcattactgcgcctatggaaaacggcaaggttttgatgagtttttcgggaaaagaattaattaaaggtgaaccggatgcatcatcttttccatccggtggattaagagcgacttttgaggcgagaggatatacagcatgggactgtacttctccggcattcgtcagacaggacgcagcaggcgcaacactctgcattccgactgcattttgttcctacacaggagaggcgcttgaccagaaaacacctttgctccgctctatggaagcaatcaacgagcaggcacttcgcctgattcggctgtttggcaatacgacatccaaaagagtaactccttcggttggaccggagcaggagtactttatcgtagacagagagaaatatttacagagaaaagacctgattttcaccggacgtaccttatttggagcaatgccgccaaaaggtcaggaaatggacgatcattactttggaagcatccgggaacgaatcgcttcctacatgaaagatgtcaatatcgaactctggaaattaggggtatcctccaaaacacagcataatgaggtagcaccggcacagcacgaactggctccgatttatgcagtggcaaatatcgcagttgaccacaatcagctcattatggagacactgaaaaaagtagcctatcgtcatggtttgcagtgtttactgcatgagaaaccatttgcgggcgtgaacggttccggtaaacatgacaactggtctatcacgacagatgacggcatcaacctgttagagccaggtaagacaccacatgagaacattcagttccttctggtactgacctgtattttaaaagcagtggatacgcatgctgatcttttgagagaatccgcagcagatgtcggaaatgatcacagacttggcgcaaacgaggcaccaccagccattttatccgtatatcttggcgaacagttagaggatgtgttatcacagttgatcagcacaggagccgctacacacagtatttcaggtcagagattagagacaggtgtaaaatcgctgcctgactttatgaaggatgcgacagaccgtaacagaacttcaccatttgcatttaccggaaataaattcgagttccgtatggtaggctctcaggattctgtttcccagccaaacgtcgtattaaatacgattgttgcagaggcatttgcagaggcttgtgacgagttagaaaaagcagatgacttcgatatggcagtacatgacctcatcaaaaaatatgcgacagagcaccagagaatcgtattcaacggcgacggctattcagacgaatgggtagaggaggctgcaaggcgcggacttccaaatatcaagtccatggtagatgcaatcccggctttaaattcagagaaagcggttgccttatttgagaaatttggcgtatttacaaaagcagaacttgattcccgtgtggagatcgaatatgagacctatgcgaaagagatcaacattgaggcaaaggcgatgattgacatcgcaacaaaacagatcatcccggctgtcatccgttatacaaccacgctggcagaatctatcaatacggtaaaaacagcctgcggcgcagacgtcagtgttcagacagaaattttagtagaagtatctgatctgcttgcagataccaagaatgcactttccaagttagaggaagtgactgcacagggcgcatccatggcacagggcagagaacaggcagtttattaccgtgatgaagttatgactgcaatgaaggctttgagaacaccggttgataaattagagatgctggtagataaatccatgtggccaatgccgtcctatggagatctcatgtttgaggtgtaaagcaaatttactaaaaaaatattgtttccaaggaaataaatataaaatttgtacaaaatcacaaaaaaataaaaaatagtcttgaaaaatgattttgaaagtattattttagttacaacaacaaaacattgcgagagaaaaagaacgaaggcgttccaacaggagttggaatgccttcgttttttgttataggaaattgcaatgtgaatcaaagaaatcaaatctcaggggatttggatgaaaagaaaggatgtagaaagatgagcgaaaaagagtacttcaatgtagccgacatctttggagaaaacgtatttaatgatgcagtcatgcaggaacggcttccaaagaaaatttacaaaaaacttcatgaagtcatggaggaaggaaaagaattagatcttgagacagcagatgttgtggctcatgagatgaaagaatgggcaatcgaaaaaggagcaacacattatacacactggttccagccacttaccggtgtgacagcagaaaaacatgattcctttatcacagctccaatgccaaatggaaaagtattaatgagcttctccggcaaggaactgataaaaggcgaaccggatgcatcttctttcccatccggaggactgagagcaaccttcgaagccagaggatatacagcatgggattgtacatcaccggcattcgtaagacaggatgcagcaggcgcaacactttgcattccaacagccttctgctcctacacaggcgaagcacttgaccagaaaacaccactgcttcgttccatggaagcaatcaatgaacagtcacttcgtttactgagattatttggcaatacaacatcgaaaaaagtaacaccttccgttggaccggagcaggaatactttattgttgacagagaaaaatatttacagagaaaagatttgattttcaccggacgtaccttatttggtgcaatgcctccaaaagggcaggaaatggatgatcactatttcggaagcatccgtgagagaatcgcagcttacatgaaagatgtaaacaaagagctctggaagctcggtgtatctgcaaaaacacagcataacgaggtagcaccggcacagcatgagttagctccgatctatgcagaggcaaacatcgcagttgaccacaaccagttagttatggagactttgaaaaaagtagcttaccgccacggtttacagtgcttgcttcatgaaaaaccatttgctggtgtaaacggttccggaaaacacaacaactggtctatcacaacagatgatggaattaacctgttggatccgggcaaaacgccacatgagaacattcagttcttattagttttaacctgtattttaaaagcagttgatacacatgcagatctgttaagagaatccgcagcagatgtcggaaatgatcacagattaggagcaaatgaggcaccgccggcaatcctttccgtgttcctgggcgagcagttagaggatgtgttgtcacagctgatcagcactggtgaagccacacatagtatttcaggaaaaatgttagagacaggtgttaaaacattacctgatttcatgaaagatgcaacagaccggaacagaacgtcaccatttgcatttaccggaaacaagttcgagttccgtatggtaggttctcaggattccatcgcacagccaaacgttgtattaaatacaatcgttgcagaagcatttgcagaagcctgtgatgagctggaaaaagcagatgatttcgatatggcagtacatgatctgattaaaaaatatgcaaccgagcaccagagaattgtattcaatggaaatggttattctgaggcatgggtaaaagaggcagagagacgtggacttccaaacatcaaatccatggtagatgcaatccctgcattgaatactgacaaggcagttacattatttgaaaaatttggtgtatttacaaaggcagagcttgattcccgtgttgagatcgaatatgagacttatgcaaaagaaatcaatattgaagcaaaggcaatgatcgatattgcaaccaagcagatcattccggcagtgatcaaatacacaaccgttcttgcagagtccatcacagcagtgaaggcagcatgcggcgctgatgtgagtgttcagacagaaatcctgacagaggtatctgatctgcttgcagatgcaaaatcagcactttccaaactggaagaagtcactgcaaaaggtggtgcaatggaagagggaagagcacaggcagtttattatcatgatgaagtaaaagcagctatggatgcgttaagagcaccggttgataaactggaaatgttagtagacaaatccatgtggccaatgccttcttacggcgatctgatctttgaggtataaaaaaatccctataaaaagggaggatgccaggtggctatccacctggcagattatgaaaaagtttataataaaaagtaatcaaaactttgaaactgtctatcgtttttatgcttttattatatgcagaagaagtgaaaatttcatgttcacatgatgaaaggtttttaaacaaattgtgaacaaataaagaatagaaattaaggaggatattatgaagaagctagaaattattattaagccggaaaaactggaagatttaaaagaagttttggattcctgtgaagtaaacggtatgaatatcgtaaacagcatgggttatggtaatcagaaaggtattatcaagaattaccgtggttctgaatatgcggtgaacctgcttcctaaggttaaagttgagacggttgtaacagatgaactggcaccttctttgatcgacaagatcgtaaaagaaattaataccggacattttggtgatggtaaaattttcgtttatgatgttgaggatgcagttcgtatccgtactggtgaacatggtacagatgcattgtaataaagtacaatggaagcttcggcggaaggaaagaggagttcggaagtaggagtgagagattgattatgaaaaaattgaatcaggaaaaaacgattatcaaaggggataataaagggcgtagtctagcctgatattatctccttttttattcgtaaaacaaggaggctaattatggatatgagtgtatggtacctgatgggtgcagcgttagtattttttatgcaatgtggatttgcaatggtagaagcaggttttaccagagcaaaaaacgttggtaacattaccatgaaaaacttaatggatttttgtattggtacagttgctttttatttgttaggttataaccttctctgtggtgaaggtggttttgtaggctggggattaaatccattcaccggatttggtgacacagactggtcaggttttgtatttaacctggttttctgtgcaacagcagcaacaattgtttcaggagcaatggcagaacgtacaaaatttgttacttactgtgtgtatagttttatcatcagtctggtagtttatccggttgaggcacactgggtatggggcgcaacaccttggcttacagatttaggatttacagatttcgcaggatctgcctgcatccatatggtaggtggtattacagccttcatcggagctgcaatgttgggacctcgtattggtaaatacgacaaaaatggtaaaccaaagccaatccttggtcataatattttaatcggtgctcttggtgtattcattctctggtttggctggtatggattcaatggagcagcagcatcagacgtaatgcagttatcacagattttcgcaacaacaaccgtagcaccagcagtagcaactgtaagtgcaatgctttatacatggatcagaaatggtaaaccggatgtttccatgtctttaaacggatctcttgcaggtcttgtagcagtaacagccggatgtgcaaatgtggatgtgattggttcctttatcatcggtgcagtagcaggtgttctggtctgcgtagctgtatactttattgaggataaattaaaagtagatgatccggttggtgcagtagcagttcatggatgcaacggtatctggggtacgattgcagtaggattatttgattacaaagacggtttattctacggcggcggggtacatcatttattgatccagttatttggtattgtatgtatcgcaggctggacaatcgttacaatgacaattgtatttacagtacttaagaaaacaatcggacttagagtatccgcacaggaagaagtggaaggtcttgattccacagaacatggtcttgaatccggatatcctgactttgttccaagagaacttcattaattcgcacgaatctaattcgattaggttcgtggaatctaatccccttagtagtatatacatcaacagtaaaaaccccaaagtgagagctttggggtttttgctgctatttcgtggtggattttttacaggtggaaggatataataaaaaagaaaatggaagaagggaaagcgtggattggttgatgaaaagaaatcttttatttatcagtggatatccggaaatcatagatgagtttcagtctgtattagaggaaaaacagattgacatggacattatcaggaatggaaatgacgcaatgaagatgttgcatgaaaaagagtatcaggtggttgtgacagacctgaatctggaaggatgcaatggagacaagataatatcttatgtaaaccaacaatttccggataccatctgcatgttgtatacaagctcgatcagtaccgtgcagcttggattttatctgaacaagcgggatgttttccgtgtgttcctgcgtccgatgaatttccggcaggaatttatgcaggcattagaggaagcatatgaactctatgatctgaaaaaacatgaccgtgacagcaggcaggaacgcttaagacagttggagagaaaccggaaagcaattgcagaactggagagaatcttagaaaaccagaataaaggctggaaagaatttgagacatttgccgggcagctgttaggttttacaatggagcgttacggaacggcatggagcgaaaaacaacgcagagcgtatgttgcggaagagaaaaaaatattaaatgaaatgtgcaaaaagccagatgacataagcattgcaagagcacaggatcaggcagaaaaaatgctagtccatagatgatgtggactagcattttttgccctgctgggcaatcatatatgattttatattactgaccgtctggggctgtatctgttgtcgaagaatctgttgttgcagcaggatcggtcacagtagtatcagaaccggccgcatcaccgatcggattgacaccggctgcaccaggaaatgcattggttccggtataggtggagtttgtctcattgtgtacggtacaggtctggcttaagaatgcttctgtcagcagatacggtgcatcctcggttgtttcggaaccaccgatcacatatactccggcagcaactgtttccggcggacaatagctgccggctaacatattagaagcggtacagatatttgcaaccgtatggtggtcacagtattctgttggctccgtaccctgtgcaaagtattctgtgatgacacagtttccacgaggatcgtggtcgcatacaccttcgatcggaagtttgccggattctttacatactgcaacagcgacaattccacttggcttggtgaaatccttataagcgaggttttcgtgtatccgcttcataacggctttccagattcgttttggataattggtatccgaaccgctctgaaccgcgttgtcatcatatccaccccagacagcacaggtataataaggtgtataacctgcgaataacgcatcacggctgctggtggttgtaccggattttcctgcctgggccatggaactgccgaagtaggcagaagtaccggtaccggaagtcataacgtcttccatggcacttgttaaaagccatgctgtggtatctttgatcactgtatgggattccggtgttgtattgtcgatcaatacattgccgtcatggtctaaaatctttgtatagaactttggtttaatgtaagttccctgatttgcgatagcagcataagcagcggtaagctccagattggaaacaccctgcgtgataccaccgagtgcaagtgcttcattcatatcacgggaatcaacggttgtaaaaccatattcctgtacatactgccagccgagggaaaccccggtctgtgcaagcgtttttacagttacaatattgatagaatcggtaatcgcctctcgtaacgttgtaaaaccgcggtaacgtttatcgtagttattgactgcttttccattagctccggcataagtgtaaggagcgtcatcctgcacagaggcaagggtaagaccgcctgcatcgagggcagccgagtaagaagccagaatcttaaacgtggaaccaggctgtcttgtggtgtcagttgcacggtttaaagttttgcttgctgtcttgtctccacggccaccaacaatggcttttacctcgccggttgactggtcgatgatcgttaaggatgcctgaggctggatcgtatagatgacagtttcacttccgtctacgatttcatcgccgtctgtcataatgtcagccttgtactgttcgatcgcagcgtccgcatcttcctcagaagcaaagttgatcgagtaattggtgctcttgaagttcgggttatccttattcttataataagaaagcatggtctgttcactgtaattttttacagatccgtcggcggaacggattgagacacgataggagaaggaaacctttggattagaggtatagttgtcctggttgttgacttcctcatctgcaatgttctggatatccatgtcctgtgttgagtaaatggtaagaccactctggtaaagggtcttatatgcctgggtttccgtatagcccttctgttctacgagatcgcggataacctgatccgtcaattcatcaataaagtaagaattgataccgttgtcctgtaattctacgttgactaactggatcctgtcataaacattatctgccacagcttcgtcatattcactctgggtgataaattcctgatctaacatattttttaatactttcatgcgtcgttccgcatttttctccgggttggagatcggattaaacctggacggattctgcgtgattgctgctaaaacggcacattccgagagcgtcagctcggacacatcttttccgaaatatcgttcggaagcgactgcgacaccgagcgtattctgcccaaggttgatagcatttaaatagttttccatgatccagttcttacttacttttttctcaagctggacggcaaggtactgttcctgtatcttacgttccagtttatcaatgaaagaagtttcactggtccattcggtgaaaacggtattctttaagagctgctgtgtgatcgtactggcaccctgggaaaagtttccgccggaagtgataccggtaacaccggcacggataataccagtgatgtcgataccgttgtgctcatagaaacgggaatcttcaattgctacaaaggcatgttgaagattgatcggtatctcgtcgatcgttacattttttcggttcgaaccggaggccactaaagtggcaatctcattgccctgattgtctaagactgtggtaagataaccggtaggtgttgcgtcaatgtcatctatggacggagcggaatcaagaattcccttataaactccaaatccaaggcttccgcctataattgcgagtgcaaaacagcatatgagcaatactttgcaaaaaacaacacgcattttcttgcggtacataatgcccttggaagtcagttcggcttgacgttttttcgaacttttctttccataattcatataataagtctccttttgatcaaatgtctaaatttaccgtctatgtattataccaaataaatgtgtcataataaagaaaaatgtgaaaatattgagttccttccatattgcattttatattcgtttcatgatagtattttgatacagatgagaaaaaaatatgcgcaagagcaggcaggtcaggagtcagaagagatgaagacagtatatgttggcggtgagggagagattgttgaaaaaaaatcccgctttattgcaacggtccgtccggtgaacagcgaggaggaagcagcctcatttattaatgaaatgaaaaagaaatattgggacgccagacataattgttctgcctttgtgatcggagacagacaggagatcagccgctgttcggatgacggggaaccggcgcagacagcaggacgcccgatgttagatgtattattaaaggaagaaatacataacgtgtgcgtggtcgttacccgctattttggcggaacactgctcggaaccggaggtcttgtccgggcatatcagaaagctacacagaccggactgcaaaacagtgtgattatagataaacagcttggaaaaaagttaacgattgggacagattacaatggacttggaaagttacagtatctgatcgcaaaagaggaacttacaacaattgacaccgtttatacggataaagtggaattaattttaatggttccgaaggaaaaagagcagatttttgaaaaagaagtgattgaagcgaccagcggaaatgccgatatttcctggggtgacgaggtgttatacgccatgattgagaaaaatttaaaaatctttgaaaaaaatgcttgacatatttagtaagggtgtatataatagctattgttgacggcgcaaaagtcgaaatcacaatatatagggctatcgccaaacggtaaggcaacggactctgactccgtcatttcaaggttcgaatccttgtagccctgctaggaagcaccacgaaagtggtgctgtttttaatttgcaggaatatgtgagaaggaattgttcattgatctttcggatacagggtgaacagaggtattagacatgtatgattttaaaagccgtgtaagatacagtgaagtgaatagtgagagacagcttacgctgccggcggtagtggattatctgcagaactgctgtaccttccagtcggaagatatgaatatcggtgtggagtatttagagaagcggcatgaagcatgggtgctgtcatcctgggagatcgtgatcaatcgctgtccgaagcttgcagaacatataacggtcagcacatggccatacaactttaagggattttacggataccgtaattttacaattaaggatgaggcaggagaaatctgtgcgtttgcaaattcggtctgggtttatatggatacggatgcaatgcgcccggcacggatcgcagaagaagtgcaggatgcctatattccggtgatgaatgatgcgatacagtatgagtggtcagaccgcaagatccgtattgagggcactcaggtggaaaaagaaccggttttggtacagcgttttcacattgataccaatcatcacatgaataatggaaagtatattcttgtggcagaagaatatctgccggaagattttaagacggagagtatccgtgttgagtataaaaaggctgcggtattaggtgatctgttatatccggaagtttatacgcagcagaacggagtaaccattgttttggcagatgcacagaaagtgccgtatgccattatacagtttagaggaaaatagaatgttaaaattaggacagtatcagaaacttacaattgtaaaaagagtggagtttggtgtttatcttgcagaggaacaggatgtggagaagcgggtgcttcttccggcaaaacaggtttcggaagatgcaaagacaggggatgaactggaagtctttttatacaaggattccaaagaccggatgatcgcaacaacaaaccagccaaagatcactttgggaggacttgcagttttacgtgtggcacaggttggaaagatcggtgcatttcttgactggggactggaaaaagacctgtttcttccttataaagagatgacaatgaaagtgcagccggaggatgaagttctggtgacactttatattgataagagcagcagactctgtgcaagcatgaagaagctttatgatctgctctccacagattctccatataaagagggagatcatgtggaaggaagagtgtatgagttcagcgataattttggtacgtttgtcgcagtggatgataaatattcagccatgatcccacgacacgaggatacgagcaagcttaggatcggagatgtgatcgaggcaaaagtcactaaggtaaaaccggacggaaaactggatgtgtcattgcgggataaagcttatcggcagatggacgaggatgcagagaaagtgatgcaggtgatcgaggagtttgcaggagtacttccatttggggataaagcttctccggaagtgatcaaacgggaaaccggactcagcaaaaatgctttcaaacgtgcggtgggacgtttatataaggaacaccgtgtggaaataactgaaagaagtatcagaaaggtggactaacaacatgaaaaaagtaatcagtacagaaaaagcaccggcagcaatcggaccatattcacaggcaatcgaagtgaatggaatggtttacacatcaggtattatccctgttgtaccggaaaccggagaaatcccggaaggttctgtggcacaggcaaaacaggcacttgccaatctttctaatttattggaagcggctggaacgaatatggacaatgtagttaagacaactgtatttatcaaagagatgaatgattttggcgcgatcaatgatgtttacaagacattctttacaacagatttcccgtcaagaagctgcgtggaagttgcacgtctgccaaaggatgttatgcttgagattgaagcaatcgcaattaaataataaagatgatgtgaggggcaaaaattaatttgctcctcgtttttatatgagagctgctttgccgccatgcaatttatacaatgctgccctaaaaatagataaaaactgattgccagatttggtagaatgtgacaaagccaggctgttgacaggtataacgctctttgctataataaccatgtaataaatgtaacaaattcgtaataaataattcttggaggcaatatacaagatgaattatagaatgaaaagaatagcaagctgtttacttgcaggtgctattgtgattggtggaacaggagttggaacatacggagcgcagacaggcggcgtatcagcagtgatcgcaaccggactttcttctaatggttccccggcagcaggattttcaaaaatgctttcccagtgcctgatcgacagtgataaggcagttgcagaagcagcagcccaggcagaggaacaggtcagcgagaatgatgttccggttgtagcatctgagtatgcagatattgcaattgcacaggtagataattatgtgaatgtcagagcagaagccaatacagacagtgaagtattaggcaagctgtataataactcagcagcgactgttttggagacaacagaagacggctggtataagatcacatccggaagcgttaccggatatgtaaaatgcgaatatgttgtgacaggagatgaggaacttgccaagagagtaagtaccagatatgcaactgtaacaacgactacgttatatgtaagaacagagccttccacagaagccagcattttaacaatgcttggtgagggagatgatttcgttgttgtagatgattccatgaaggatagcggatgggtaattgttacaacagaggaaggtgacggatacgtttcaactgattatgtaaatctctggactgattttgtgactgcagaatccaaagcagaggaggaagcaagacttgcaaaagaagaagcagagcgtcaggcagcagccgctgcagcagcgaaggcaaaacagaaatcctccagcagctcatcttcaagcagtacaagcagttccggtggatcatcttctgcatcctactcagcaccgagcggatcagatggtcaggcagttgcaaattatgcaagccagttcattggtaatccatatgtatatggtggttccagtctgacaaacggaacagactgttctggatttgtaatgtctgtatatgcagcatttggcatcagccttccacattcttccagcggacagagaagcgccggatatggggtaagtttatcagaagcacagccgggcgacattgtatgctatagtggacatgttggaatctatgtaggtaataacaccattgtacatgcaagtacaccgtctagtggtattaagtattcaacagctacatatcgtaatgtactttctgtaagaagaattttctaaacaggtatcatttggactgtcacatttgtggcagtccttttttgatatttctattaggtgtttgcgaaactcaaatccatgctattaaattgtgaagaattaaaaaatgcttcgcaagtttcataacagaaaaaatacgatttataaaatatgcacaaaaaagaatgggcatctcagaaatattaaacaaagacatggaagttatgagaaagttttccacgtgaaaaaagtcgaaaaatactaaaaaataaagttatacacgaagttatccacgttatccacaatttttggcggtaaaaatgtggtttacatagtaaaaaaatcgaatatacgttttgtacatatgtgataaagttaacgataaaagaaaaaaactattgcattttttgtaatgagataaaaggaaaaaatagtgtgaattttcagacaacataaaacggacccgccattcacggcggatttataacgcaacttgaaaaatcaaaagaggtttgctatactacatgcataaattttcttgaactgagaaaaataaccaggagtgttaaatgataaagaaagttgatatactgggaattcagttggacaattacacagtgcgggaagcaattatgtgtgtggaacgttttctgagcaataatgtccttaatacgatcgagagcatttccttgcagatgctgatcgattcggagacgaacccggtattaaaagaagttatgagttccctgaatcttgcagtgatcggagagaaagaaatcatccaggcagctgggcttgagtccatgcagcgaatccgggaaacagaggaaaatgatttttattttgaattttttaaacggatagagcgcaataaaaaaagtgtttttttacttggagatacgcaggagaaaatcgatacactgaaagcggaattaaatgaggattatccgaagcttgtctttgcgggagagtatgctgtggagaactgcgtaggagatttagaagcagtgatcaatgatatgaatgcgactacaccggatgtgatcatatctgttctgccgtctccgatgcaggagcagttcttatatgagcaccgggataaaatgaatgcaaatatctggtatggaatcggagggataccggtacataagaaaaagcatggtatacttgcccgcttgaaaagcatcatacatcgtggcaagttgatcaacagtatgaataagtatgatgaaaaagaagaggaattgtagtagaaatgcagaaattaatcaataaacgttccatggtgatagattatctgatgatgatcgtggggacaggactgttagcggcagccatccagtgtctgtatgatccgatcggtcttgtcacaggaggttttacaggacttgcgattgtgatcaaagcagtgacagagagatttgtgccgggaggaatcccactctggctgaccaatattgggctgaatgtgccgctgttttttctggctctgaagtttaaaggaaagaggtttatctggcgtactgttgtgggtacggtacttttgtctgcgtggatttatgtgattccggcaattgatctgacacagcaggattacttccttgccgcaattttcggtggtgtgatcggaggagccggcatgggactgatccttttggcacgttctaccacaggtggaacggaacttctggctgtattgatccagcactttgttagacattattccgtggttcagatcatgcaggtattagatgccatgatcgttctgaccggactgtatctgtttggtatcaaggcaggaatgtatgcgatcgttgccatttttgtcacaacgaaagtgtcggatggcctgatggagggatttaagtattccaagtcagcgttcatcattacagaccagtatgaaaaagtggcaaaaaagatactgctggagttagaccgtggagcaaccggtctatatgcaaaaggaatgtattccggtgatgaaaagtgcatgctttactgtgttgtttcaaagaaacagatcgtggaactgaaagatatcgtggcatcggtggatccggatgcgtttgtcattgtctcagatgtccgcgaagtactcggcgagggatttctggaatatcatgggaacagataattttttgtggagattgtatacaggtaatataaggtaaaatttccagcaaaattgaggaaatgcataaaaaaatatgtatttcctctttatttttttgcagttttgcattaaaatgtaatctaggtatttttgttgagggagaaaagtaaggttttttttgtgaaagttgaacagaattgaccagagaaggagcatagcttatgatttcgaatcagatacttcagaacacaattgatggattgaagggaataaccagaattgatttatgcattattgatgtcgagggaaagattttggctgcaacatttcctgatgcagagaagtatgtagaacctgctcaggcatttgtggagtcacctgcagacagccaggtggtgaacggatatcagtttttcaaggtgtttgatgagcaccagttagagtatatcctgcttgccaatggagacagtgacgacgtctacatggtgggtaaaattgccagtttccaaatacagaatcttctggtagcatataaggagaggttcgataaagacaactttatcaagaatcttctgctggacaatttactgctggttgatatttataacagagcgaagaaactccatattgatacagaagtccggagagtggtatttatcgttgagacgaaccgcgagaaagatggcaatgaactggaaaagatcagaggaatcttcggtggcaaatccaaggactttgtcactgcggttgatgagaagaacatcatcgtggtgaaagaagttgcggacaacgagggatatgatgaactgaacaagacagcagaggtgatcgtgaacctgttccgtgcggatgctgagaacgatgttcatgtcgcttatggaacaattgtaaatgagatcaaggaagtatcccgttcttacaaggaagcacgtatggctctggatgtaggaaagattttctttgaggaaaaagatgtgatcgcatactccacacttggaattggacgtctgatctatcagctcccgattccactgtgtaagatgtttatcaaagagatttttgatggcaaatcaccggatgattttgacgaggagacactcacgaccattaataagttctttgagaacagcctgaacgtttccgagacatcacgccagttatatatccacagaaatacactggtatatcgtcttgacaaactgcagaagtacacaggactggatcttcgtgtgtttgaagatgccattacctttaaaatcgcactgatggttgtaaaatacatgaaatatatggagtcattggattactagatttaggaggaagcaatgattaagttggaacatgtcagtaagtcatatacggcaggaatccctgcattaaatgacgtaagtcttgacattgaagaaggcgaattcgtattcattgttggtgacagtggttcgggaaagtcgacactgatcaagcttttgctgaaagaactggaaccaacagaaggtacgatcacgataaacaataagaaactgaacaagatcagaagaaggcaaatcccgaaattccgtcgtaatatcggcgttgtatttcaggatttccgattgttaaaagacagaaacatttatgataatgttgcatttgcccagaaagtcatcggggaatcaaaccgcagcataaagaagaatgttccagccatgctgtctatggtaggacttgctgcaaagtaccgctcttatccaagacagttgtccggtggtgagcagcagcgtgttgcaatcgccagagcactgattaatgagccgaagattttactggcagatgagccgaccggtaacttggataaccataatgcatgggagatcatgaagttgctggaagaaatcaatagccgtggaactacggtggtagttgttacacataacatggagatcgtgaaagcgatgaataagcgcgtcatcactatgaagaaaggcgttgtggtagaagacaacgagggtgattatagcgatgaggattagtacatttttttacacgataaaacagggacttaagaatatctggaagaataaaatgttctcacttgcatcgatcgcaacgatgacggcgtgtatctttttattcggtctgttctatacgattgtgacaaatttccagtcaatggtgaaggatgcagagtccggcgttgccgtaacggtcttttttgatgaggggatctcgcaggataaaatggatgagatcggtgatctgatccgggcaagggcagaggtatcgaatgtggaatttgtttcagcggatgaggcgtgggacagtttcaaacagacttattttgaaggaaacgaggcagcagcggagagctttgccggggataacccactggcaaatgacgcgagctattcgatttatatgaatgatatttccatgcagcagacactggtaacttatctggagtccgtagacggtatccgggaagtaaaacagtcggcagtcgtggcgaacacactgaccgattttaataaattgatcgggtatgtctcagcaggaattatcattatcctgctgggagttgcagtttttttgatcagcaataccattaccgttggtatttctgtgcgaagggaagagatcggtatcatgaagctgatcggtgcaacagattattttgtacgtgcaccatttgtggtagaaggtattgtgatcggattgatcggtgctgcgattccacttggcattttgtatgttctgtatggcaggatcattgattacatcggggagaagttcagttttatcagcaatatgatgaaatttttaccggcagacgaagtgttccacactttggttccggtagcgttgatactcggtgtcggcattggcttcattggcagccgcatcacaatcagaaagcatttgaaagtataattttatgatgaaaagaaccattttacgccgcatcttagcggtggcacttgttctcacgatggcaacaggactgacggtgcaggcaaagcaggatgcctcatccacgtcactgaaagaagcacagaaagaaaaagaagctttagaaaaacagttaaaagcagcaaaggacctgatcaatgatctgaaagactccaagggagatgtggaggacaaagttcaggaactgaatagtgagctcgttgatatttcttctaagatcacatctttggaaaaccagcttgcagataaaagcaatgagattgcggatgcagaggctgagctgacgcaggcggaggaagataagcagaagcagtacgatgatatgaagatccgtatccagtatatgtacgagaacagccagacaacgtacattgagcagctgttagaatccaacagtgtcgcagaatttttgaacactgcagagtacattgcacagatacagaagttcgacagacagaaattagacgagtatacagagaatattgaatatatcaccaatgcgaaagcgcagcttgagcaggattatgcggatctggagacgatgaaggcgaatgtggagagccagaaacaatcggtggcatcgcttatgagcaagaaagagacagaacttgcaggcatcacaagtaatatttcagatgcgcaggaggatgcaaagtattttgaagcagagatccaggcgcagaacgaattgatagcggagatcaagcggatcgaggctgagaaagcggcagcggcagccaaagcggccgcagaaggaaaagaggtggcggacaatccttatacaggtggagctttcacatggccgtgtccgtcaagtacaaggatcaccagtgattacggaacgagggtttcaccgacttcaggagcgtcttcaaaccataaaggaattgatatcggtgcctcagcaggtgcggcgatcgttgcagcggcaaacggtaccgtaaaggcggcaaattacagcagtgcagccggaaactacgtgatgatcgatcatggtggtggactttataccgtttacatgcattgttcctcgcttgcagtttcagagggaacagcagtatccgcaggccagacgatcgcctacgttggaagtacaggtatttctactggaaatcatttacattttggtgtatcattaaacggaagttatgtcagtccgtggagttatctcaagggctgataagagttccgggaatcaggcagataaagtatataaaagaggttgccacacaaaagccggaaatcagaaacggcattttgtgtacaatctcttttttctgttttgtaaaggttatggaaaataaaaccggcacctcggcatttttctcaattgctgtgaaagtggaggtgtggttatgcatatgtttacatggaaaggaagcagcggaaatgttttgaaattgctgcgaaaggaaatttatggatcagcagaattatgaactggatcaaactggagcgaaagaaactccaacgaagaaaaaaggaagcacagtcaaagggatcgtgatcggtgtgatcggaacacttctgataagctggacggggatcaacgtggcatgtctggcaacaaattcacagatactgatcacgaacaaggagagtgcagatgatggggaaggtgcagtgctcgacgcagatacggtcagcaagatcaatgaactgacggcatacacaaagctctattattatgatgacactgaaaatgagaaactgcaggatggactttatacaggcctgatcgatggactgggagataaatattctgtttactataatgcagaagactatcaggcgcttcaggtgtctacgacaggtcagtactatggaattggtgcagggttaagccaggataaggataccatggtggtaacggtcaacaaggtttatgagggaaccccttctgagtcagcaggattgttaaaagatgacgtgatcgtttccgtggacggaacagagggtacttccatggaactttcggaactggtcaaactgatccgcggagagaagggaacaactgtccatctggagatttaccgtccgtctacagaggaaaatctttccgttgatgtagaaagacaggacattacattgccaagtgtgtcccacaagatgttcggggatggtatcggatatgtacatattgattccttcgagacagagacagcagcacagtttgaagaggcagtgcaggatctggaagatcagggaatgaaggcactgatcattgatgtcagatataatcttggcggcatggtgacagcggttgttcagatactggatgatattttgccggagggaacggtcgtatataccgaggataagaatggaaaccgtcaggattatacttccagtggtgacacttacttagattatccgatcgcggtactgatcaatggggagagcgcaagtgcgtctgagattttagcgggtgcggtcaaagattaccagtatggtacattgatcggaaccacaacgtttggaaaaggaatcgtgcagacgattttcccattggaagacggagatgcagtgaagcttaccactgcaaaatattttaccccgaacggaaattatattcacggtgtcggaatcgaaccggacattgaactggaatatgaatatctggataaagacggtacttcctatgatgaggtatacgacaaccagattcagaaggcgatagaggttctaaaggataaaatccagtaaatgacaggagaacagcatgaaaaaacaactttatcggattgttacagggatactggcagtggcatggatgtgtctgattttttctttttccagccagcctgcgacggaatcgagtaaagtgagcggtggattatgtcatcgtctggtggagcagaccaatgaggtgctccacttagacatgacagaggcgcagcagttatcaatcgcagagaaaatcgaatatccggtaagaaaagcagcccatatgacagaatatgccatattaggtctgctttcttttgcattttatcgaggaattttaaggaaagaaaagagacagtttttagcgtcacttgtcacagcagcggtttacgcctgtacagatgagtttcatcagtattttataccgggaaggtctgcagaagtgcgggatgtgtgcattgatacgcttggagcgtttattggacttgcaattcttttttttaccttaaaagtagcacgaaaacattgccaaaaaccaaagcttactttacaataaaaatagcagacaggtaaaaagagcctgccagataataaaatgaaagaggtgatactgtggtagaacttgatcaatttaaagtgactctgaattcatacagaagtccgctgcaggaagtgagggattcactttgacctggctgacaaagagcagaagatccaggaattagagcgggaaatggaagacggcgatttttggaatgatccggtcgtttcccagaataaaatgaaaaccttaaaaagtatgaaggatgatgttgcgacttatgagaagcttgcaacacagtttgacgacatagaaacactcatcgagatgggatatgaggaaaatgatgcttccctgatcccggagatcgaggagatgttgaacgaatttatcacaacctttgaaaacatccgcattaagacactgctttccggtgaatatgatggagacaatgcgattttgtctttgcatgccggagcgggtggaaccgagtcctgtgactgggcgcagatgctgttccgcatgtattccaaatgggcagacagcagaggctacgagctggtcgttttagactcgttagacggagacgaggcaggcatcaagtccatcacgttccagatcaatggagagaatgcgtatggatatctgaaatcggaaaaaggcgtgcaccgtctggttcgtatttctccgtttaatgcggctggaaagcgtcagacttcttttgtgtcctgtgatgttatgccggatatcgaggaagatcttgacattgaggtcaatgaagatgacttaagaattgatacttaccgttccagcggagccggtggacagcatatcaacaagacttcctctgcgatccggatcacgcaccttccgaccggaattgtcgtgcagtgccagaatgagcgctcacagcaccagaacaaagataaggcaatgcagatgttaaaggcaaagctgtatctgttgaaggagcaggaaaatgcagagaaggcagccggtatccgcggtgaggtcacagagatcggctggggaaaccagatcagatcctatgtcatgcagccttacacgatggtcaaagaccaccgtacaggtgtggagaccggaaatgtggacagcgtaatggatggaaaaatagatctgtttatcaacggatacttaaagtggttatctttgggatgcccgaagggattaggtggcgacgatgaataactggattccggtgatcgtcatactggcggtgctcgcaggtggcggttattatgcataccggaaaatcaaaagaaaagtagaggatgtttcccaggctttattcgggacagattcattggtggagggatggaataagcaggcagatgaacttgcagccaccccgaaatccgtgtccgggatgacgcggatctttgaaccacagatccagagggatttcccggattttaatctggtgcagtttaagaataaggctgagaatatgctggtttccgctttgcaggcaattgattccgggaatgttgcgctgatccgggatgcttccgaggaattaaaagcgcaggtagaaaatagaattgaaatgaaccggtcggaaggaatccgtgaagtatacgaaaagatacggattcatcggacggagatttccaactatgaaaaaaaacagggaaaatgtatcattacatttcagagtgctgtggaacatcttcattataaaaagaaagatggaacagtggtttcaggggatgaaaaccgattggagcagacaaagtataatgttgaggtcatgtatatccaggatgagaagatggcaaaaatcgacaatgctgtcggaacaacctgtccgcactgtggtgcaccagtcaccaatctgggggcaatgtactgcgagtactgcggacttgcgatcacaccgatcaatttaaaagtttggacgcttcatcgtttttatgaagtagattacaatcacgtataggaggatatgttatgggaattattagggcaattggacaggcgattggaggaacacttgcagatcagtggttagaggtcatcgaagcagatgacatgagcgacaaaaccgtctttacgagcggtgtgctgatccgcaaaggacagaataccaagggaacaggcaacacagtttccaatggctcgatcatccatgtttatgacaatcagttcatgatgttagtggatggcggcaaggtagtcgattacacggcagaaccgggatattacaaagtggataactcttccctgccatcattgtttaacggacagtttggagattcattaaaggattcttttaaccgtattaaatatggcggtcagacaccaactgtgcagaaagtattctttatcaatctgcaggaaattaaagggatcaagtttggcacgagaaatccgatcaattactttgataatttttataatgctgagcttttcttaagagcgcatggtacatattccgttaagatcaccaatccactccagttctatgcagaagtaattccgagaaacgcagacagagtggagatcgatgagatcaacgagcagtatctgtcagagttcttagaggcattgcagtcctccatcaaccagatgtctgcagacggaacacgtatttcctatgtgacatccaaagcaagagaacttggaaaatatatgtctacgacactcgatgaagagtggaaccagacacgtggtatggaaatccaggcagtcggtattgcaagtgtttcttatgatgaggaatcccagaagctcatcaatatgagaaatgaaggtgcaatgttaggtggagatgcaagtgtgctccgtggtatggctgttaagaatttaacagaaggtgtgcgtgacgcgggttccaatgcaggcggtgcgatgacaggattcatgggtgtcggcatgggaatgcagcagtttaacacttccatggaaggattgaacgccatgacagcaggcatggcaggaacacagccacaggcagcaccacagcaggcagcagcaccacagcagacagcagccccggcaaatagctggacctgtgagtgcggagcatcaaataccggaaagttctgcagtgagtgcggaaaacctgcaccagctccggcaaatagctggacctgtgaatgtggaaccgtgaataccggaaagttctgcagtgagtgtggaaaacctgcaccggcagcggagtggacctgtgagtgtggaaccgtcaacaaaggtaaattctgcagcaattgcggaaaggcaaggagctaactatggcagttatcagttttaagtgtccaaactgtgacggagaactgatttttgacccggaaacacagaagtataaatgcgagtactgtggttcaaaatttacccaggcggaattggatgcattgcagccggcagagtcaaaggagatgaatgccggtgcagcggatggttctgatgaagcagagcaggaaacaaccgaacagcagagtgcggacacaaagaaaaaagaaggggaggacggcggcgcagaggcagtcatttataactgcccatcctgtggagcagaaatcgtgacagatgcaacgacagcagccacgttctgttattattgtcacaatccggtcgtgcttggaaaacggctggaaggaaagtatcttccaaacaaagtcattccctttaaaatttccaaaaaggaagcggaaaaacgcttcttagagtatgttggaaagaaaaaatttgttccaaaggcattttttaataagaaacagatcgaatgtctgagcggtgtctatttcccatattggatctatgatgcaaaattgcaggggaaactgcagggcgaaggcaagaaaatccgtgtgtggagaaccggagacaccgagtacacagagacaaagttttaccatgtggagcgtgagggtgaggtcgatctgaagaatcttgcagagaacgcactgcaaaaggcaaatgtgcagcttgtgaaaggggtactgccgtatcagttcaatgagatgaaagattttaatatgggatatctttccggtttcatggcagagaaacgcgacatcgagcagaaagcagtggaaggaaatatgcaggctacgatgaaaaactcagcggaaaaactcatgcgggaatctgttcagggatacaatgcgttatcggtcaactcattcggggtggtcccgaagaaggaggactggtcttacgcattgcttccggtttggactgttacctataaggggaaagatggaaaaatctactattattccatgaacgggcagacaggaaaagtgttcggagaacttccggtagactacggaaaagtcacgctgacgggtattatttcggcagtcgttgtcttaatcattgcattgatcggagggtatttcttatgagagataaattaagaaaaagaatcgctctgtccgcagtaactgcactgacactttttgcggctgtaccggtctatgcggatacttatgatgcggtgtatgatgatgcagcgttactttctgatgaggaacagcagtcgctttcggaaaaaatcaccaatctgcaggagaccacaggctgggaagtctatgttctgacgaccgaggatgcacagggaaagacagcgagagagtatgcggatgatttctatgatacgatagcaacaggcgatgatggcgtggtgttcctcattgacatggataacagagaggttacgatatcgactgcgggagaagccatttactatctgaatgacgacaggatcgatgatatcctggataactgttatgattatgttgtggatggggaatatgcttcatgctttgcttccatgttaagtgatgcagagtactattatgaggtgggagtcccatctgacgcttatacctatgatgaagaaacaggcgagatccattattatcatgtactcacgttgggcgaaattctgtttgcagttgtacttgcagcagctgtgtttgcagctgtattttttggaattaccggaaaataccgtctgaaatttggtggcggataccagtatgattaccatgcgttcggaaaagttaacctgaccggacaggaagaccgttttgtcaaccagatagtgacgcatcggaggattcagaccaatagtggaagcagtgggggtggcagcagccattccggcagatcgacggtacataccagcagttctggcagaagtcatggaggcggaagccgcaagttctaaacatcagaaatttggtgaacaagaaacaaaaatatagaaatgttctggaaaagaggttgccttggcagcctctttgtgttattatcttcctcatgaggacagatgtaagtcccaaacaaacagaatagattctatatacaaaagagaatctgttgaatctggcaactaagaggtattcatttccatgaaagacaaaatgcaatattatgttttgaaagagaaggcagtgccggaagtactgctgaaagtagtggaggcaaaaaggctgatcgattccggtaagaccgcatcggtgcaggaggcgacagagagtgtaggaatcagccgcagttctttttacaagtataaagatgatatttttccttttcacgagacaacaaaaggaaagaccattacgatggtcattcagatggatgatgagccggggcttctgtccggagtattgaaaacgatcgctgattttcatgccaatatccttaccattcatcagagtattccggtcaatggaatcgcgacgctgacgctcagtatagacatcttaccacagacgggtgatgtcgcagagatggtcacaaaggtcgagagtgtgggcggcattcagtacgtgaagattttggcgagagaataaaaacagactggcagaatagtatggtttacataatgcaaaacagaaaggcagaataaaaatgataaaagcagcaattatgggttttggaacgatcggttccggtgtggcagaggttttagacatcaataagaagagcattgcggcacgtgtgggcgatgaagtggaattaaagtatgttcttgatctgagagatttcgagggagatccgatccaaagtaagatcgtgcatgactataaagtgatcgccgaagatccggaagtgtcgatcgtagttgagacaatgggtggcgtggaaccggcgtatacttttgtaaaaacaatgctggaggccggaaaacatgtgacaacttccaataaggcattggtggctgcaaaaggtgcagagctgatcgcacttgcaaaagaaaaaaatgtgaacttcatgtttgaggcaagtgtcggcggcggtattccgatcatccgtccgttgaattcctgtcttactgcagatgagatcgaagagatcacaggtatcgtgaatggcacaacgaactatatgatgactgagatgacagaaaaaggtgctgattttaatgaagttttaaaagatgcgcaggcaaaaggttatgcagagaaagatcctactgccgatgtggaaggttatgacgcatgccgtaagattgcaattttaacatctttagtatgcggacagcaggttgattttgaggacatccacacagagggaatcacaaaaatcacaccgacggatatcaaatacgcacaggcaatgggaagagcgatcaaactgcttgcaacaagcaaaaaaggaccaaaaggctatacagcgattgttgctccatttttacttccggcatcgcatccgctttatgcagtaaacggtgtgttcaatgcaatttttgtacatggcaatgtattaggagatgcgatgttctacggcagcggcgcaggaaaactgccgacagcaagtgcagtggtagccgatgtcgttgagatggcaaagaatctggacaaaaatattccaatcgagtggagttcaaagaagttggaactcgtagattacaaggagtgcgagaacaggttctttatccgcacaacagcagacaaagcagccgtagaaagagtattcggaactgtcacttatgtgcaggcagaaggtgtgaccggagagcttggatttgtgacagagaagatttctgaggctgactgcgagaagaaggaagcagaacttggagatgttttacagaagatccgtgtagcgtaaagatatagaaatacaaatttatttgcatttggtgaactgcaagtgaataaaaagagaaagataaatggaaattttgcaaaaataaagcgaaatttccatttttatgttagaataccaattaaacagttcggcttatggatgaataaaacgagtcagagtacgagaaagtaaatgagaacaggagaacagaacgagatgaaaaaaatcggaattatcggagcaatggagcttgaagttgaaactttaaaatcaaaaatgaatgttgcaaaaacaacaaaaaaagcaaacatggaattttttgagggaacattaaatggtgttgaggttgtcatcgtgcgcagtggtatcggtaaagtaaatgccggtatctgcacacagattctcgcagatctgtttgatgtgacacatatcatcaataccggtatcgcaggctctctggatgcacagattgacattggggacattgtagtttccacagatgtccttcagcatgacatggatgtacgtgtattcggttatccattaggcgagatcccacagcttggaactttaagctttccggcagacgagagaatggcatcccttgccaagagtgtgtgcgagaaagtcaacgcagaagtgaaagtgttctccggcaggatcgtaagcggcgaccagtttatctgtgataaagaggtaaaagacaagcttgtagagaacttccacccactctgtactgagatggagggggctgcgatcggacaggcagcatacttaaatgaaattccattcgtgattttacgtgcgatttcagataaagcagataactctgcggagatggattatcctacttttgagaaaaaagcagcggagcattgtgcgaagcttgtggaagaatttattgtggaattgtaaagatagtgcagaattagtaaagcagctttacgatgtaatcacgatataaaagcgcaagagaggaaaatacaaatttgccaaaatacgataatttagggcaggtatttaaaaatctgcgcacaaacagacatatatcactgaaacagatttcggacgagactgtttcagcttctcagatttcaagatttgagagaggagaatcggatttatcgttagaaaagttcctcacagctttggatcatatgcatattgaagtaagtgaatttatggatgccgtaaataattaccagcgcaccgaacagattcgctttatgagtgccttgattccgttggaatatgagagagatgtcgcaggctttcagaaaatgcaggaggaagaaaaacgagacaaagttattggcgagcagggcagtaaacaagattggaaatgtcatgtatgactatggaaatagcacatggattgcaggattgggaagaatagaactgtacttcaaagtaaaatgaaatttaattgaagtgacattgaagttgactttgaagtgacgttgaagttgactttaaagtggtgttggagaatctggcagaaaatcagtatctggagaaaagcaaggtttcgagagcagtttactataagacaaatcctaggatggtaagaattcaataaaccaaaagtaatgaaacagagaaaatgtatgataaaagaaattgcacaataaaaatatataaaaattctcagtaaaacattgcttttttatgcatatatgctataatgattccatcaatggaatcaaaagttcagacataattgaataaatgagtagaaatcagagagtggagatgattcaaaggaatactgctgtggggtgcagcagtatattttcgatgtgtcacctcccatttttatgtctgatttatggtgcagtcaaattgtaaaagttcgaaagaacaggggagcattttggagcagaattgaaaggagaaacaggtatggcaaaatatgtaatggcattagatgcgggcacaacaagcaaccgttgtattttatttaatgagaaaggtgagatctgttccatggcacagaaagagttccggcagtttttcccgaatccgggctgggtggaacatgatgcaaatgagatctggtcatcgatgcttggtgtttcggtggaggcgatgaacatgatcggagctgcggcttccgacattgcagcgatcggtatcacaaaccagcgtgagacttccatcgtgtggaacaaagagacgggagaaccaatctacaatgcgatcgtatggcagtgccgcagaacatctgatatcgcagatggactgaagaaaaaaggactggaggaagtttaccggaaaaagacgggactgatcattgatgcctatttttcagcaacgaagatcaaatggattttagataatgtaaaaggagcaagggagcttgcaaatgagggaaaattattatttggtaccgtagagacatggctgatctggaaatttaccaagggtgcagtgcatgtgacagattattccaatgcttcgaggactatgctttttaacatcaatgacctgtgctgggacaaggagattttagaggaactggatattcctgagagcatgcttccgacaccggtgccgtccagccagatttatggttacaccgatccgtccttcctgggggatgaagtaccgatcgcaggtgcagcaggcgaccagcaggcagcactttttggtcagacctgttttcatgcgggtgaggcaaagaatacatacggcacaggatgtttccttttaatgaacacaggagaaaaaccggtattttcaaaaaatggtcttgtgacgaccattgcatggggactggatggaaaagtaaactacgcactggaaggctctatttttgtggcaggtgcagcaatccagtggcttcgcgacaatatgagattaatcgattcctccgcagactctgagtacatggcaaaaaaagtacacggaacccatggctgttatgtggttccggcatttaccggacttggcgcaccacactgggatcagtatgcgagaggaaccattgtcggtatcacaagaggaaccaacaaaaatcatatcattcgtgcaacgctggaatccatcgatcttcaggtatgtgatgtcattgatgcaatgcgtgcagatgcaggcgtagagttaaaatcgttaaaagttgacggcggtgccagtgccaataacttcctgatgcagttccaggctgacatgatcaatgccccggtcaagagaccaagctgtattgagacaactgcgatgggcgctgcgtatctggcaggacttgccgttggctactggaagagcaaagaggatgtgatcaaaaaccagagcattgactgcgtattttccccacagatgagtgaggaagaccgtcaggcaaaacgcaaaggctggaataaggcagtcaaatacgcttacggctgggcaaaggatgagccggaagaggaagaagaatagaatagataaaaaagatatgtcttggagcaggagacttcaaggcatatcttttttatatcctgcaataatggaaaatattagacatgcttatggataaaaattttttccgactgattccatgaaaaaggttgaaaattagaatcacatatgataaactcattacaatttatacaaaggaatgtttacattcttttggcatgaacaaaggtatgcttcggagcggatagacatatccggtttgactgccccatatataggttgtgatcacagagcgtgacaacagagagtcagcagagcagacgaccggcagcgcttgtggcacagagcaaaaggaaaagacggaaacgtttttttttt

SEQ ID NO: 14306 - DNA, 16831 bp, Unknown
  gut microbiota DNA sequence
ttggttctaccaaagaagtcattagtgagattgtttttaacacctcaatgactggttatctggaggtcttaacagatccttcctatgcaggacaggcagttgttatgacttatccactgattggtaactacggtattacaccggatatggagtctaagaaaccatggccggacggatacattgtaagagaattatccagaatgccgagcaacttccgttgtgagggcaccattcaggatttcctgacaaaaaatgatattcctggtatcgcaggaattgacacacgtgcacttaccaagatcttacgtgaaaaaggtacgatgaatggtatgatcacaacaaacgagaactataatatagaagaaattattcctaaattaaaagcttacacaacaggaaacgttgtagataaagtgacctgtgaggaaaaacgagtattaagcggcgcaggaaaacgtgttgcactcatggatttcggcgcaaaaaataatattgcccagtctttaaataatcgtggctgcgaagtgaccatttatccggcacacacaacagcagaagagatcttaagcacaaatccggacggaatcatgttaagcaatggacctggagatccaaaggaatgtacagacattatcaaagagatcaaaaaactgtatgattccgatactcctatttttgccatttgcttaggtcatcagttaatggcacttgcaacaggagctgacacccataaaatgaaatacggacatcgtggaggaaaccaccctgtcaaggatttaaaaacaaaccgtgtatacatttcatcccagaatcatggatatgttgttgatacagacaccttagatccaaagatcgcaaaaccggcatttgtcaatgtcaatgacggtacgaacgagggacttgagtatgtcggaaagaacatctttaccgtacagtttcacccggaagcatgccctggcccacaggattccggttatctgtttgacagatttatcgagatgatgtcataactaacgagaacttgagtgaatatatagaaggagaaatcgtatgccaagaaataaagagatcaaaaaagtattagtaattggttccggtcctatcgtcatcggacaggcagcagagttcgactatgcaggtacacaggcatgccgttctttgaaagaagaaggcgtggaagttgtgctggtaaactccaatccggcaaccattatgacagataaagagattgcagatgaagtttacattgagccgttaaccgtagatgtattagagaaaatcatcgcaaaagaaaaaccggacagcgtacttccaactttaggaggacaggctggattaaaccttggtatggagcttgccgagcagggagttcttgataaatatggtgtgaagctgatcggtacaactgctgagacaatctttaaggcagaggatcgtcaggcgttcaaagataccatggaaaaaattggagagccatgtgcagcatcccaggttgtcaacaacgtgcaggacggtatcaaatttaccaacacgatcggttatccggtggtacttcgtccggcatttacccttggaggaagcggcggtggtatcgcacacaacgagcaggaattagtagatattttaacaaacggtcttcgtttaagccgtgtcggcgaggtattagtagagcgttgtatcgccggctggaaagagatcgagtacgaggtaatgcgtgatgcaaacggaaactgcattactgtatgtaacatggaaaatattgatccggttggtgttcataccggtgactctatcgtagttgcaccttcccagacattaggagacaaagagtatcagatgcttcgtacttctgcgttaaatatcatctctgaattaaacatcacaggtggatgtaacgtacagtacgcattaaatccggattcctttgaatactgcgttatcgaggtaaaccctcgtgtatcccgttcttctgcattagcttccaaagcaaccggatacccaattgcaaaagtagcagcgaaaattgcattaggatatacattagatgagattaagaacgcgatcactggaaaaacatatgcaagtttcgagccaatgcttgattactgcgttgtaaaaattccaagactgccattcgataaatttatcacagcaaagagaacacttaccacacagatgaaagcaaccggagaagttatgagtatttgtaataactttgaaggtgcgttaatgaaagcaatccgttccttagagcagcatgtagacagtcttatgtcctatgatttcacaggacttagcgatgccgaattaagagatcagttaaatgttgtggacgaccggagaatctgggtaatcgcggaagcactgcgccgtcatttcagctatgatgagatccatgcgatcacaaagatcgacaaatggtttattgataaacttgccattctcgttgaaatggaagaaacattaagaacacagccattaacaatcgaattattaaaagaagcaaaacgtatcgaattcccggataatgtaatcgcagaactcaccggaaaaacaaccgaagagatccatgatatgcgttacgaaaatggaatcgttgctgcttataaaatggtagacacctgtgcggctgagtttgaagctgctaccccatactactattctgtattcggaagcgagaatgaggcagaggagactaacccacagaaaaaagtattagtattaggttccggtccaatccgtatcggacagggtatcgagttcgactattgttctgttcacagcacatgggcatttgcaaaggaaggctgggagactgttattgtaaataacaatcctgagaccgtttctaccgactttgatattgcagacaaactttactttgagccactgacaccggaagatgtggaggcaattgttaagattgagaaaccggacggagcagttgtacagttcggtggtcagacagcaatcaagttaaccgaaagccttatgaaaatgggtgttaagatccttggtacaaaggcagaggacgttgatgcagcagaagaccgtgaattatttgatgaaattctggaaaaaacacagattccaagagcagcaggtggaactgtatttaccgctgaggaagcaaaagaggttgcaaaccgcctcggatatcctgttttagtacgcccttcctatgtattaggcggacagggcatgaaaattgctttcaatgatgaagagattgaagaatttatcggaatcatcaaccgtatcgcacaggatcatccaatcttagtagataaatatttacagggaaaagaaatcgaggtcgacgctgtatgcgacggaacagatattttaattcctggtattatggagcatattgaacgtaccggtatccattccggagacagtatttccgtatatcctgctccgacaatcagtgaaccggtcaaagagatgatcgtggaatacaccaaacgtctggcacaggcattacatgtaattggtctgatcaacattcagttcattgttatggatgagcaggtttatgtgatcgaggttaacccaagatcttcgagaacagtaccatacatcagtaaagtaacaggtattccgattgttgacctggcaacaaaagtgatcatcggtgagacaatccgcggtatgggatatgagccgggacttgcaccgacagcagattacattgcaattaagatgccggtattctcttttgaaaaacttcgtggtgctgagatctccttaggaccggagatgaaatctaccggtgagtgccttggtattgcaaagactttcaacgaagctttatacaaagctttcctgggagctggtgtaaaacttccaaaatataaacagatgatcatgacggtaaaagatgcagataagccggaagcagtaggtgttgcaaagagatttgaagcattgggatacaagatttacgcaacaagaagcactgcaaaatatttgcaggagcatggtgtaaatgcacttcgtatcaataagatttcacaggaatcaccaaacgttatggacttaattctcggacataagattgaccttgttattgacacaccgacacagggtaacggtgataagaaccgtgatggcttcctgatccgccgtaatgcgattgagacaggcgtttactgcattaccgcaatggataccgcaaatgcactggcacggagccttgagactgcaaccaatgagctcaatccaatcgatatcgctactgtaaagaatctgtaaaccggagttgaacttaccgtagagcagcagattttgtggtgctttcttaggctgtaaaggggcagatataagcgtcctctcacaagtcattcttattatgttgattaaaaagaaaaatcgtacagacgaaatattatgtttctgttcgctggacattccgataagcctctaaagagtcttatctccatagctcacgaagaaaataatatttgtctgtacgatttttcttttcatctacgctgtgaatgacttgtgagaggacgtttatctttgccccgctttacattaatgggtgcagccacaaaatcagtcaattcaccaacgcttcatattctttccgaatttagatatatatgcctgcttctggggtaatcggttcccacttatttttatacttttcttgcaattctttttgcatggaaagcatatcatttattgaaaaattattcataataaacatactccattattgatttgtttaatagtacattatcatatcatgcagacaatacagctttttcaagaagaaccctataaatattctcgatatcaagatcgtgtgtatcctgcctgattacatcatagatttgtttgatcagatttggcgatttttccggcatttctgcccttgagttctgattcacgcagatcatccgcaaataattccggtaaagcttcacacatttttctttcctccctcaattcttcccagttggctcgcataatggtatctgcaagtgcctgatataactttgaatttttatttttcccgtattgttcaataaagtttcgaatttctccacctgattttaaatcattgcgcagattattcagccagtaattgttttcttttgacaatttaggaatgacaataagctgcattggtttcttcgacagcagatgttcctgctcaaattccagatactctgcctctgcttccagctcaatctgcaacgctgcatcaaaggctggatgtcattggattttgtcatcgtttgtgttcaatcattttccccctttatgatagttgaattttctgtgcttttcaatgcataagaaatatttttattgtaaaacgtgccctagaaaagacagtttaacaataagctataaagtctcgtgcattaaaaattttcatcaaaatggaatctcgtgccgaatcggctgtgaaagttgagattatttcgtgatttcatcactcaattatttcgccgtgcgtcaaatacaaatgaatttgtatttgacgcacttgcgctcattatatcctacacttgaaaaacagattttggatttgcagacagaaacgaaataagactaatcgtaattatgaaaaaaaatcggtagaaaattttacatctatgtgctagactttataatcatacaaataagtaattgcaaaaataatagaagaagcacagggggatttatgaagcaggataccattgcaaactgcagaaatgctctgtatcagattttattttatggagttatgattatttattttatactcttattttttcttcttttcagaaaaaaagcagcaggatcttttcaatcggtaaatttgataccgtttcattccattggtgcctatttattcagtgatgacatggtttcgcgtgcttttgcgctgagtaatttattgggcaatattgctatttttattccgatgggagtttaccttccgttgctgataagaagaaaatccatcttcgtcaataccatatgtgttgcattgataagcgcggttgttgaggtcttacaatacatttttgcagtgggatcagcagatattgatgatgtgatcttaaataccgttggtggtctgatcggtgtaagtttattcagagtcatggaattattattgaaagatcagacaaaaagagcagttacaatacttgcacctgtggggggaattttttcatttctcatacttttcttggtaaacaggtaacggtagtaccgttaccagcgacacgtagcggaagagtgttttcgaaaattttgttaatttttcacaatgtgaagtagattatgatgagtttcgcaaatatctgttaaacgatagaacaacaaaggagagaaaaagcatgaagaaatttgatgacgatcttgagtttgaatcattaaatgaagattcgcgggattcccgctttatattaccaattatcattgttgcggttttgcttgtcattgtgattgtggctctggttttattaggaaaaaacggtaaaaataaagatgcaagtgccgatttagtgtcaacagagcagagtgagacaacagagacagaaacacagaccaccgaggtaatggggaatattgcaacaaccgagagtacagaagaagtggaggcagacgatccacagaatggtaacatgggaactgacactggagcaagcgttgatgtgacggcactgttatcggcaggaaatgtaacggagtctggtgagacaaccttcggaattgatgtggcgagatatcagggcacaatcgactggagtcaggtggcagcttccggcgtgcagtttgcgatgatacgtgtcggttaccgcacgcaaaagaccggggagatcgttgctgattccaatgcaaaatataacatgcaggaagcacaggcaaacggtattaaagtgggagcttatttcttctccacagcgatcacagcggaggaagctgtacaggaagcggactgggtggcagattacatttcccagtatcagattacctatccggtcgcatttaactgtgaaggttttgaaaatgcggatagcagacagtacaacatgacgcagtcggagcgaaccgatatggcgatcgcatttttaaatgagatctataatcgtggttacacaccaatgttttatgctgcaaaaaatgagatgaccggcgatgcaaaatgggatacttcaagaattgagaaaacctataaaatatgggtatcccaatacccaaccgtaccgtatccgcagaccgcacagtccgattatgccggaacacatgcgatgtggcagtacaccaatcagggaactgtagcaggcatcagcaaaccggtggacgtagatattgcttattttggttatgccggaacagcggatgcccagagtgatgtggcgccggaaacggtcagcgcagatgcggaagctttgatgaatttctctgaggttaatgagactgttactgcaaaacagtccacaaatcttaggaatattccaagtcagggatcagacgcaaccgtggttgcaaccttgcagaatggtgacacggcgacaagaaacggtgtgagcagcagcggctggtcgcgcgtaagctataacggacagacgttatatgcagtatccagttatctgacgacagatttaagttattctgcaccggctgccactgcaacagcaccggcagacacaacgacaacggacggattgggatcaggagacggattaaaaacaaagtttactgcctgcagtgatgtggtgacggcaaagattgaggtaaatttaagaacgcttccaagtgtcacgaacccggatgcggcagttgtcgccgtattgaaaaacggagaaactgttacaagaaccggaattaataccgattacggctggtcaagagtggattataatggtcagacactttattgtatttcaagttatctgacaagcgcacaataaaaaagaagctgttacattcagacagaaaaaacactgaatgtagcagctttttactttatagaaagttacgatgcaatatttctataaaatcaaattagattagtttttttcgctttgccggacgtttctttggagcaggcgctgcttcgtttctggaggcaatggaaggaccggaaacggttgcggcaggtttgtcgataacaggctgtgcggtatgcagaccggaaagagaaggattccgtcgctggcttattttttctttctgtgcacgaaagcggtcagcagttgccttgatataaggatcggcaacaaactgttttaaagtatcgctgtcaatggcaatgcggttatccattgttttcataatatctacgatctgaagctggtcagaaacttccggatcgctcagatcataaatctgattatccttgaaatttaagatcatcggatgaagaaaatcagccgggttgtcagcgagaaccagtcctttttcaccgtttgcaaaatccaggcaggcaccggcaggaagaatctggatactgtcggcgagagctgtgatcacggaatgatcgtattgtgttatattttcatggaaatatgacatggcagccagttctgacattggcggatgattgatattcatcgcagtcagacggtcgaatttgtcagcaacctttaaaatatcaattaaaagctgaacctgaggctttggcggcttcggattgatcgtggcatgatccatgaaaaccatattctggatgatttccaatgtcgtatcatttaaaccaagctctgcaaaatgaggacggatcgtttcgtagccatgttctaattttaaacggatcaggtcgcggtctgatgcagagaaatcctcgtttttatccagaatactctttggaacagacagataaccaaaatcatataataaagaagcagcgatgagcgactgggactgatccgggtcgatgtgcagttcatttgtgatcatggcagtaaggattgcgacactgagcgagtgcttgtatacaaaatcggcagagcttctgagtgtctgcgtgaaattgagcttatgatccaatgcgccgtaatgagtgtaaatattctgcacaagttccctgacgcttggaatattccgattgataagaagcttatccatgcagtctttcaacttaaacatatagacagtctgaaactgttcaaattccatatcttctttggaaagcggaggcacaggctcagcaggttccagaataaaaatgccgatcagaccaaaattattaatgctgttaatactttgaagtgtcaactttgtgtcacgctcgtataagagaactcccattttgttataaataggttttgccagcctcattcctggctttaaatcttctgattttacaaactgcatataccccatacctttcctgcaaaaaatgtgataaaatagctataattccgaaataagctatatataccatataatagcatattgaaaggttaaatacaatctgctatcatggttgcgtggaagaaaaatacaggaaaccgtcagatgaaccagtgctgcccaggcaaaactgattcattctatcaatattttacagagtgaggtacctatgaaaaaaatccctttcaaaaggatatttgccgcagcagttttagtatgctgtcttaccgtgacaaccgcttatgcggatgttacgcaggaggacattgataatgcaaagaatcagatcaacaacctgaaagaccagcagaaggatgcacagaatgcggtagacagtatcaatgggaaaaaagacgatttagaagatgacttaaacacgttaaacggacagatgtcgaatatcgtatcgtccatgaatgcacttgagtcacagattaatgataagaaaaaagaattgtctgacctagaggatgagatcgagcagacaaaggaaaatctcgaagtcgcaaaacagcagtcagaagatcagtacgaggatatgaaaatacggattcagtatatgtacgaaaatggcaatacgccgatgttagagatgctgctttcgtcagcgtcattttctgatttcctgaaccggacggagtatgtctcggagattaattcctatgacaggcaaaaactggaggaatttatcaatgtgcaggagcagatcgcagccgaggaggcttcgttggaggaacagcagaaagacttagagagtgaacagcagcaactgcttgcgatgcaggatgatatgaaagtcaagcagaattctgtaaacagtctcatcagttccacacaggcgaacatcagccagacaaatgcagaactgagcagtgcacaaggcaaagtgaacgatatcaacagtcagattgcccaaatggaagagatagagaaacagttggagattcagaaggcaaaagaggatgcagcgcgaatggcagagatcaagcggcaggaggcagagaacaatggagagttttcctatgtgccaagtgacagcgatctgtatctgctcggtgcaatcatccagtgcgaagctgacggagagccttacgagggaaaacttgcagtcggaagtgttgtcatgaaccgtgtgcgcagttcctatttcccgaataccgtttccggtgtcatctatcagagcggacagttctcgccggtagccagcggcaggtatgcgcttcgcttagagcagggtgtgaacaatacctgcatgaaggcggcgcaggaagtgctcgacggtaacattacaaacagctgcctttatttcaggactgtgatcgagggattggaaggaacagtcattggtcatcacattttctattaagcggctggcaattgcgcaaattacataaaaatcatttttgaaaccaaatggaaaaagagacgtttttgtgagaaatatacaaaaaacgtctcttttttgtgaaattgagtggatgcgcatgataattttttaacgaaaaaccgtatgcgaaatggttaaaaaccaaatttaaatactgaaaaaagtgtaaaaaaaaaagaaagctattgcatttgaaaataaaatatggtagcatgagaaagtactgaaaagccaataaaaaagccgaatacataaaaacgtagaaaattaggaacaagaaaatttaaatttaaaagaaaagattttaaatttattttttttactaaaagattgttaaaaaaataacaacgtttttcggcagatttattatgaaggaaacaaaatatactgcatattatgagcggtgttttgtaccacaaaaccgaagggagaattcaaaatggcaagaaaagtagttttagcaggcgcatgccgtacagcaattggtaaaatgggtggagcattaagcaatactccagcagcagacttaggtgcaatcgttatcaaagaagcattaagaagagcaggtgttaaaccagagatggttgacgaagttaaaatgggttgtgtaatccaggcagctcagggacagaacgttgcacgtcaggcttctatcaaagcaggactcccaatcgaagttccagcaatcacgatcaacgttgtatgtggttctggtttgaaatgtgtcaatgatgcagctaccatgatcatggcaggagaagctgatatcgttgttgcaggtggtatggaaaatatgtcaatggcaccatacgctatgacaaaagcccgtttcggatatcgtatgaacaatgcaacaatcatcgatacaatggtaaatgatgcattgacagatgcattcaatcattatcatatgatgatcacagcagagaacgtatgtgataaatatggaattacaagagaagagttagacgagttctcagcaaacagccagcagaaatgtgagaaagcaatcgctgagggcaaatttgcagatgagatcgttccggttccggttaaagtgaaaaaagagatcgtagatttcgtgacagatgaaggacctcgtgcaggtacaacagcagagtctttagcaaaattaaaatgctgctctggtaaagagggcggacttgttacagcaggtaacgcttccggtatcaacgatggtgcagcagcaatcgttgtaatgagcgaagaaaaagcaaaagagcttggtgttacaccaatggctacatgggtagctggagcacttggcggtgttgaaccagaaatcatgggtgttggacctgttgcttctactaagaaagtattagctaagacaggacttactattgatgatatggatctgatcgaggcaaatgaagctttcgcagcacagtctatcgcagttgcaagagacttacactttgatatgtcaaaagtaaatgttaacggcggtgcgatcgcactcggacatccagtaggagcttccggatgccgtatccttgtaacattattacatgagatgcagaagagagattcccacagaggtcttgctacattatgtatcggtggcggaatgggatgctctacaatcgttgagagataattaattcagacaaaactgtccggaaagcaggtgactgcttttccgggcgtttccattacatattaaaaattcagaataaattcaggaggtactaacatgaaagttggtgttattggtgcaggaaccatgggacagggtattgcaaaagcatttgcccaggtagaaggatatgaggtagctctctgcgatatcaagcaggaatgggctgacggcggaaaagcaaaaatccagaaaggctatgcaagacttgtagaaaaaggaaaaatgacacaggaagctgttgatgctatccttgctaaaatcactccgggattaaaagaagacctttgcgcagactgcgatctgatcgtagaagcagcattcgaagatatgggagtaaagaaaactacattccaggaattagataagattgcaaaaccagagtgtatctttgcttcaaatacatccagcctttccatcacagagatcggaaatggccttacacgtccgatggttggtatgcatttcttcaacccagcagaccgtatgaaattgatcgaagttatcgctggtgtaaatacaccagatgagaccgttgaagctattaagaaaatctctgttgaaatcggaaaaacacctgtacaggtaaatgaagcagcaggattcgttgtaaaccgtattttaatcccaatgatcaacgaagcagcattcatcaaaatggaaggtgtatctgatatcgcaggtatcgatgcagctatgaaacttggtgcaaaccatccaatgggaccattagagttaggagatttcatcggtcttgatatctgccttgctattatggacgttctttacaaagagactggcgacagcaaataccgtgcatgcccattgattcgtaaaatggttcgtggtggtaaccttggtgctaagagcggaaaaggattctatgtatacaatgctgaccgcacaaaaacaccagttgacgctcagtaattaacagatattaaggaattaggaggctaaatcctctcctcgttcagaggataaattttactgcgtaaaataggattttttcttcgaaaaaacaaggaggatttgaaatcatggatttcactttagacaagaaacatgaaatggcgcgttccctgttcagagaattcgctgaaaacgaagtaaaacctcttgcacaggaaactgatgagacagaacagttcccggcagagacagttaagaaaatggcaaaatatggattcatgggaattccggtaccaaaggagtacggcggacagggatgtgatccattaacatatgttatgtgtgtagaagagttatcaaaggtctgcgctacaacaggtgttgttgtttctgcacatacttccctctgcatcgatccaattatgacttacggtacagaagaacagaaacagaaatatgtcagagcacttgctacaggtgagaaacttggagcttttgcattgacagaaccaggtgctggtacagatgctcagggcgctcagacaaaagctgttttagacggtgacgaatgggtattaaacggatcaaaatgtttcattaccaatggtaaagttgcagatgtttatattgtaatcgctatcacaagcatcacagaggacaagagaggaagaaagaaaaagaacttctccgcatttatcgtagaaaaaggtgctccaggattctccttcggaacaaaagagaagaagatgggtatccgtggatcttctacatacgaattaatttttgaagactgcagaattccaaaggatgcgttacttggacctgaaggaaaaggattcccaatcgctatgcatacattagatggtggacgtattggtatcgcttcccaggcacttggtattgcagaaggtgcattagagcgcgcaatcgcttatacaaaagaaagaaaacagtttggccgttctatcgcacagcagcagaatacacagttcaagttagctgatatggcaacaagaattgaagccgctcagatgttagtttataaagcagcaatggcaaaagcaaaccagaaagtttactctgtagaagctgcaaaagcaaaattattcgcagcagagacagcaatggctgttacaacagaagttgttcagttattcggtggatatggatacatcagagagtacgatgtagagcgtatgatgcgtgatgctaagatcacagagatctatgagggaacaagcgaagtacagcgcatggttatctcaggtgcattgctcaagtagtagaaaatataataacataaggagtggaaaatacatgaatatcgtagtatgtattaaacaggttcctgatacaaagggtggagtaaaattcaatccagatggaacacttgatagagcagcaatgcttgctatcatgaacccagatgacaaagcaggtcttgaagcagcattaagaatcaaagatgagacaggagcaaaagttacagttcttaccatgggacttccaaaggctgatgcagttcttcgtgaagcaatggcaatgggagcagatgatgcaatccttgtaacagacagagtattaggtggagcagatacatgggcaacatctactacaatcgctggtgctcttcgtaacttagattacgatcttatcatcacaggacgtcaggctatcgatggagataccgcacaggtaggaccacagatcgctgagcatcttggtttaccagttatctcttacgcagcagacattaaagtcgatggagattctgttatcgttaagagacagtatgaagacagatatcatgaattaaaagcaaaaatgccatgtctgatcacagcactttccgagttgaacgagccacgttacatgactccgggtggaatctttgatgcatgtgacaaagaagtgactgtttggggaagagcagacttaaaggatgttgatgattccgaccttggattaaaaggatcaccaacaaagattgcaaaagcatctgataaagtagcaaaaggagctggtgagaaagtaaatcttgatccagcagaatccgtagcatacttgatcggtaaattcaaagagaaacacattatctaaaaaaataaggaaaagtggtgaataagatgtcattagaagaatataagggagtatttgtctttgcacagcaggtagataacgtattagacggtgttgcatttgaattgcttggcaaaggtaaagatttagcaaaagacttaaatacagaagttacagcagtattgatcggctctggcgtcaaaggattagcagatcagttagcagagtatggtgcagaccgtgttatcgttgtagacgatcctgaattaaaagaatacagaacagagccatatgcacatgcactggcatctgtaatcaatgagtacaaaccagagatcatgttagttggtgcaacagctatcggacgtgatcttggtcctactgtatcagcaagagttaaaacaggtcttacagcagactgtacttctcttgaaatcggagatttcccattggttgctgctccaggaaaagaatctgagcagaaacacaatcagttgttaatgactcgtccagcatttggtggtaacacaatcgctacaatcgcttgcccggataaccgcccacagatggcaaccgttcgtccaggtgttatgcagaagattgctccaatcgctggtgtaaaagcaaacgttgttgaattcaatccaggattcacacctgacaacagatatgttgagatcctcaatattgtaaaagctgtaaaatctacagcaaatattatggaagctaagattttagtatctggtggacgtggagtaggttctaaagagaacttcaaactgttagaggatttagcagaagtacttggtggtactgtaagctgctcccgtgctgttgtagagaatggctggttaccagtagatcttcaggttggacagacaggtaaaacagttcgtccacagatttacttcgcaatcggtatttctggagcaatccagcatgtagcaggtatggaagattcagatctcatcattgcaatcaacaaagatgaagatgcacctatcttcgatgtagctgattatggtcttgttggagatttaaataagatcgttcctgcattgactgcagcattaaaggctgagcttggtaaataagccggagcttaacttggtaatgtaggcagattttgtaactgccttataagttatgaagggcagatataagaatctatacacaagtcaaattattagtgtaaataaaagaaaatcgtgcaaacgaaatatgatgttcctgttcgcaaagctcacaaaggaaatcatatttcggttgtacgatttttctttttctctatgctgtgactgacttgtgcatgtactcttatatctgccctgctttacgttgtgtgtccagcgaagctggaccacactagccggtgtaagtccggtcacggtaatcgccagtgagccgtgtagctaaactcggtg

SEQ ID NO: 14307 - DNA, 21606 bp, Unknown
  gut microbiota DNA sequence
agaaagaagaatgtcggaaagccgtgtgagggagaacctcatgcacggtttgatgaggggcggatgaaattttcatccgcctactctacatgttcataaccaatttattcaggggatttaattatatgaaaaacaaattatacgacacatcgaaaatcgactgggataatctcatgttttccacaaaagaattatggatgcttctgatcccgattatggtagagcagatgttaaattccttaatgggaatggcagataccatgatggtaagcaatgtgggaagcgttgcgatgtcggcagtttccctcgtagattctatcaacacgcttgtaatccagatgtttgcggcgctcgccaccggagcggcgatcatctgctcccattatcttggaaaaggagatgaaaaaggcgcgaacaaagcagccagacagatttttctcactgtgatcgtgatctctgtgacgctgacagcaatcggattgattttctgcaaaccattgcttcgcctgatcttcggagcggtagaacctgaggtcatggaagattccattatctatttcctgatcacggcatcttcctatccgtttattgcattgtttaatgcgggaggcgcgttttatcgtgccggaggaaactctaagttcccaatgaaaatatcgattatctcaaatgtattgaacattcttggaaacgcgatcctgatttttggatgtaaccttggcgttgccggagctgcaatttcaacgctggtttcaagagttttctgcgcggttgtggtactgtattttctgcggaagccaaagcaggagattgttttaaaccagtaccacacgatccggccggattttcccctcattggaaaaatacttgcgatcggcgttccggcgggtgtggagaatggtatgtttcagtttggtaagcttgcaattcagtcaactgtttcgacactgggtacacaggcgatcgcggcacaggcaatgaccgttattttcgaaaacgtaaatggaatcgcagcgatcgcagtcggaatcgggcttatgacagtagctggtcaggcgtttggtgcaggcagaaaagaggaagccagatattacatattaaaattaaccggatatgcggagatcgttctgatcatctcctgtctggtgacattcgtgatcagccgcccaatcatgtatcttgccggaatggagccggagagcatggaactctgttatcagatgttaattgtgatcacgattgcaaaaccgattctgtgggcgctgtcgtttatcccgccatacggactgcgcgcagccggagatgtgaagttttccatgatcacagctacgtgcacgatgtggttttgcagggtggcacttgcgatttatctgatccgttttcagggatttggaccgatcgccgtgtggatcggtatgtttgccgactggggaatccggagcattatattttcggcacgtttcctctcaggaaaatggatgggaaaacacgttatttaaaggatgcatttcgatagaatatgtatagaaagtctttagaaaaattaatgtttttttaaagactttttttgttataatatgataggcttttttcataagttttatgaaaaagacagatgcaatatagtttgacatatgtattgcatgagtataacgtatgaatcaaagggactatgtaatgatgaagaaatattgtttgatgatattgcttgcagctttactattgtgcggatgtggcgcagaaacacagacagacacaacagaagcagtttcagatacagcagaagagaccgggcagcagacagaagaaaaagacgtgacggaagaggaggagccagccagcacgcagtatccggtttccgaagcagacacagagacgatttatgcagagaaggaaaagaatcaggaactggcagactttctgatcagttattatcagataccggaggaactctgcgcagagacacgctattattatgatgaaacggatctggatgaagacggaacagatgaggccattgcggtagtagtgggagaatatacggaatgtgacggcggtgacccggcgctgatcttaaaaaggtcagagcagggatatcaggttttagaaagctttgcatatgtccgcacaccggtgtatgtgagcagcgaaatgacgaatgggtggcatgatcttatttttccagcttacggcggcgaggaaggaacgggatttcgtatttttcactatcaggacggcataggttatcagaacgaaaccatggaatttgtggagaatatggatgaaaatttctgcgggaaaaaaatgatcgcgaacaattttattgatgatatggataagggaaattatctgactttgcgcgaaactccgttatcgggaaattaaatcagaaaaattagctttatattataccctttcaatgctataatgaaatacaaatcgttattatttttgcatgatttaaaagggtgtgaatatgaagaaaacgaatataaaattaaaaggaaagcttcgcagatatttgaactggcctttgtatctcaccattgtattgatattaatggatattgcgatgtatgcgcagaatatacaaatgggggcagagttctcaggatttatcgttctatattttatcatagtgctggtatcgggcagaagaaaccgtccactgctgatcaatgaactggtgaattttgccacgcagtacggaacggtacagaaacagcttttgaatgatttcgagatcccatatgcgctgcttgactataattcgagatttctgtggatgaatgaaaagtttacagagatcacaggcaaggacaaaaattaccataagtcagtgaccacagtatttccgagtctgaccaaggatatcctgcagaagtccgaagcgttagaatcaataaatgtaatgctggatgaccgcaattaccgcatttccatgaagcgtatttattttgataccgtgacaagggacagctcgatcgtggcaatcaatgacaatgacgaatatctgaccgcaatctatctgtttgacgagacagaactgaaccgttatatcaaggaaaatgaggaacagaagcttgttgcaggacttgtctacattgacaattatgaggaagcgttagacagtatcgaggatgtcaaacgttctcttctgatcgcacttgtggatcgaaaagtgaataagtattttacggagatcgacgcgcttgtccgtaaaatcgagaaggacaaatattttgttgtatttaaatacaagtatttagagcagctttctgcggataagtttaagctgatcgaggacgttaagagcatcaaggtcggcaatgaaatggcgatcactttgagcatcggagtcggtgcaggaggtgtcagctacacgcagaattacgagtatgcccgcatgggaattgatcttgcattaggacgtggcggagatcaggtcgttgtaaaagagggcgaggaagtcacctattacggaggcaaggcaaagcaggtagagcgtaacacgagggtaaaagccagagttaaggctcacgcactccgcgagatcatcgagagccgtgaacacgtagtgattatgggacatgcgatcagtgacgtggattcgctcggcgcagcgatcggtgtttactgcgcagcccgcgtgcttggcaagaaagcacagatcgttttaaacgaggtcacgacatcccttcgcccgctggtagaatgttttacggaagaaaaaggttatccggcagatttattcattaagaatgaagaggcgcttctgatcacaaataagaatacgctggtcatggttgtggacactaaccgtccgagctacacagaatgcccggagctgttaaaacgtaccgacacgatctgtgtattcgatcaccacagacagaacagcgaagtcattgagaatccggtactttcctacatcgaaccgtatgcatcgagtgcatgtgagatgatcgcggaagtattgcagtacttctcagagaatattaagttagagccgagtgaggcagactgtatttatgcaggtatcctcatcgatacgaataattttatgacaaaaacaggcgtgcgtaccttcgaagcggcagcttatctcagacgtgccggagcggaagtgacgcgtgtcagaaaaatgcttcgaaatgatatggctgcctataaggcgagagccgaagctgtccgtcatgcagaggtttacagaggctcgtttgcgatttctgtatgcccggcggataatattgaaagtcctacaattgtaggagcacaggcggcaaatgaattattaaatattgtaggaatcaaggcatccttcgttttgacggaatatcagggaaaaatttacatcagttccagatccattgatgagatcaatgtgcagcttatcatggaacgtgtgggcggtggcggtcacttgaacgttgccggagcacaattaacgaactgtacgattcaggaagcaaaacgaattattcaggacaccattgatgaaatgctagaagaaggagatattcaggaatgaaagtaatattgttgcaggatgtaaaagctttaggaaaaaagggagaggttgtcaacgtcagtgacggatacgcacgcaacgctattttcccgaaaaaattaggcgtggaagcaaacgccaaaaacttaaatgatctgaaattacagaatcagcatgcagacaaagtggcacaggagaattatgaggctgcgcttgcaatggctgagaatttaaaagataagaaagtaaccgttaagatgaaagccggagaaggcggaagaacatttggctctgtttctacaaaagagatcgcagcagcagccaaagagcagcttggcttagaacttgacaaaaagaaaatgcagctttccgaaccgatcagaagctttggagttgtggaagttcctgtaaaacttcacacaaaagtaaccggaaaacttgctgttcatgtagtagagttatagggaggatctcatggaagagactctgatcaagagaagcatgccgaacagtctggatgccgagcagtctgttattggctccatgatcatggacaaagatgcgatattgacggcgatggagatgctgacgagtgatgatttttatcacaaacagtatggagttttatttgatgcaatgatagaactctacagcaaagggcttccggtcgatcttattacattacagaacaaattaaaagaaaaagaagttccggaggaaatttcaagtctttcctatgtgaaagagcttttggatgcagttccgacttctgccaatatcaaatattacgcaaaaatcgtaaaagacaattccatgcggcgcagactcatccgattgaatgaagagattgagaacgaatgttacgccggaaaggaaagcattgatacggtcatggatatgacggagaaaaaagtgttcgatcttctttccaccagaggcggtggtggagattacgttccaatccgtcaggtcgttatgaatgcgttggagaagattgaaaatgctgccaaaacttccggaaccgttacaggtattccgaccggatttatcgatctggactaccggactgccggtttgcagccttccgacctgatcctgatcgcagcgcgtccgtctatgggaaaaacagcgtttgtattgaatattgcgcagtatgtggcattccatgaagatatgtgtacggcaatcttttctttggagatgtcgaaggaacagctcgttaaccgtctgttctcactggaatccagagtcgatgcgcaggcacttcgtaccggtaatctttccgacagcgactgggagaagctgatcgaaggcgcaggcacgatcggtaattcaaaactgatcatagatgatacaccgggtatttctattgcagagatgagaagcaaatgccgtaaatataaactggaacatgatctgaaactgatcatcattgactacttacagttaatgtccggttccggtaagggaagcgattcccgtcagcaggagatttcagacatttcccgttccttgaaagcgctggcgcgtgaactttccgtccctgtgatcgcactgtcacagttgtcgcgtgctgttgaacagagaccggatcacagaccaatgttgtccgatcttcgtgagtcgggcgcaatcgagcaggatgccgacgtggttatgttcatctaccgtgatgactactacaatcatgattccgagatgaaaggcatttccgagatcatcattgccaagcaaagaaacggtcctatcggaaccgtgaatctcgtatggctgccacagtacaccaaatttgcgaacatggaaaagaattagaaatattatattattggaaaaattcatatttttacaaaaaaccgggatgacatacgcagatatgcaaaatcgaatgtatgtcatcccgatttttgtctgaaaaaggcgaccgattttacttgagagcctgtccgtaaaaccatataattaggaggaaggaaagtgattaaatcaattttaataacgtaaatgagagtttcataagtgcgtatatcaaaaaaagcgagggaaatatggaaaaagtacggtatatgatttcagatgcatcgagcatggtgaatgtggaatcgcatgtattacgttactgggaagatgaattggagttaaacattccgcgaaacgaaatgggacaccgttactatacacaggaaaatatcaaagaatttcaatatatcaaagaactaaaagagaaaggctaccagctcaaagcaatcaaaatgatcgtacataacggcaacatggagcagaaactgccggaactcaccggaaatccgcaggataagacagaagctgtgaaaaatcatcaggtttactttaaaaatccggagacacttgcgcttgcagaggcaaagcagagcatattagacaacacagaccgtatggcacaattcacagaactcatgacagatattgtgggcaaggcgatcgcagcaaacaatgaaagtttaagcaggactatcagtgaagatgtgggagagcaggtgcttaaagagatgaattaccttatgcgggagcgggaggagttagaagaagaacgtttccggcagctcgatgaggcaatccgtggaaatctgaaaaagaaaaagacgccattattaaaaaaatggacaaagaaaaaaccgtcagaagcctgacggtttttcctatgtacttttgcaaagcgtatcacggattattcttcgctgatagctcctgtaggacaaactcctgcacaagttccacagctaacgcaagaacctgcatcgataacgaactggctgtctccctggctgatagcgcctactggacattctggttcgcaagttccacagctaacgcatgaatcagaaattacgtatgccattgatattccctccttataattaaataaaaatcattattctgcgtatctattatacgcatcacatcagaaatgatgtgcagccaccgtcgccggtaactttatttcacattctaatacaaaaaggtacggtttacaagtctataacatgaaaaatcgtgtattttaattagcacaagccaataaaatacacgatatgaaaaacgttaatgataaaatacgatcaataacaaaaaatattaaaaagttgaaaaatgatacagtgtcttggaacggaaattctcgtccggatgaagcacgatacttgggaagttctcatggttgatcgcatccggatagtgctgtgtttcgaggcagacactggaatgtccggcatatggaacaccttcctttcctggaagcttcataggctggtttgctacataaagctggagtcccggctggtctgtaaagcaggtcatgcggattccggtttctttggactggagtacagccgcctctctgagacctgttccgttaatgacaaagttgtgatcgtaagtgccgaattttttcaactgttcatagttggaattatacatctttccgatcgtgtgcatggtgcggaaatcgaaaggtgttccgtctaccgggatgaactttccggtcggcgcctgtgaatcgtcaagctctgtgatctcatctgcatcaataaaaagttcgtgagacataatatcaccacgaccctctccattcaggttgaagtaaccgtggtttgtcacgttcaaaagtgtgtcagcgtctgtcgaagcttcataaaggatcgacagttcattgtcctctgaccagccataagtgacagtcagtgtaagatttccaggatatccctcttccccgtcggctgaattcatggtaaaaactaatttgtcatctttgatcttggattcccagaccttcgaagcataaccgatgataccgccatgcaggtggtttgttccattgttgactgcaagctggtattcttttccattcaaagagaagtgaccgtttttgatacggtttgcaactcttccgacaactgcgccgagactggcgtcatcatctgcataatgatcggcagtggaaaaaccgaggcacacatccaccggattgccgttccggtccggaacaacaatttttgtgaggcggcagccaaagtcgatgatctctacataagcgccgcttgtattttctaaatgaaataagttaatattggaaccagtttttgtcgttccaaattcagattttgtgattttcataacaatctccctcctgtaagaaagacgctgatattcttaccaatatatataataccggaaaataagcagttattatgaaaaaataactgctacatgaatattctttacctaattaaaattattatgccacatttagaaaaacatagcaagtatgttgcctaatttttggaattgtgagataataatacatgaatgttcggaggaataatatgcagacaaaagttgtaaaaatagatcccattcagatagacgaaaaagaaatgcaggaagcagcagaactcatccgggagggagagctggttgcattcccgacagagacagtatacggtttgggcgcagacgcgcttcatccggaggcatcaaagaagatatatgcggcaaagggaagaccttctgataatccgcttatcgtgcatatctgcaaattcgaggagcttgtctccattgcaaaggaagtacctgagcaggcgaagaaattatcagatgcattctggccgggaccgcttaccatgatcgtctggaagaatgaaaaagtaccatatgagacgaccggtggcatggaaacggtggcaatccgtatgccaaagcacccggtagcattaaagctgatcgaggagagcggatgcctgatcgcagcaccaagcgcgaatacatccggaaaaccaagcccgacagaggcttcccacgtgaaactcgacttagacggtaagatcccgatgatcttagacggcggaccggtaggtatcggtatcgaatcaacgatcattgacctgacagaagatacaccaatgatcttacgaccgggttacattacaaaagaaatgttagaagaggtgttaggcgaagaagtgaagattgatccgggaatcatcgcatcggattcgctgacaaaaccgaaagcacctggaatgaagtacaagcattatgcgccaaaagcggaccttgtgcttgtggacggcgaggcgcagaaggttgtgggcaagatcaacgagcttgtggctaagaagcaggcagagggcttgaaagtcggagtgattgccacagacgagacgaaggagcagtatcaggcagatattgtagtgagcatcggagcgagagcggatgaggatgcgatcgcacagcacctttataagatattgagagagtttgacgactggaatgtagatgcaatctactcagagagttttgcaacaccaaggattggacaggctatcatgaatcgtcttttgaaggcggctggacatcaggtattacatgtgtagtccaagatgactgacgcatagatcagaaaggcatgatttatatgaaacaatataaccgaatcctgtttgtggcagagagcggcacatcccgtgcaccaatggcggcagggattttaagtgaatacacattaaaacatccggtgacaatagagtgcagaggcttagttgtactttttccggagccgttgaaccagaaggcagaggcagtgatgatcagcaatggaatcaactgggagaattttacttccacgcagcttgaggacgaagatttcacggaagacacgctagtgctcacaatggaacacagccagcttgacaagatttttgaaaaatatccaagtgctaaggctgaaaatgtttacgtgctgacagaacttgtcggtgatgaattagagattttagatccttatggcggatcgctgcagtcttatggactgtgctatgaaaccatgagaaaatcaatcataaaattagtaaaacttttaaacgaaggagaataaaaacatgtcaaaagtagtagtaatggatcatccattaatccagcacaagatcggaattatgagaagaacggatacaggttccaaagatttccgtacacttgtaagtgaggttgcaatgttagagtgctatgaggcaaccagagacttaaagttaacagatgttgagattgagacaccgatctgccacgcaactgtaaaagaattaaaaggtaaaaaacttgcagttgtacctattttacgtgcaggtcttggaatggttgacggaatgcttgcaatgatcccggcagcaaaagtaggccacattggactttaccgtgatcctgaaacattagagccagtagagtattactgcaaattgccggatgactgcgctaaccgtgaggtattcgtagttgatccaatgcttgcaacaggcggatcttccgcagcagcaatccagatgttgaaagataaaggtgttaagaacattcatcttatggttattatcgcagctccggaaggagtaaagaaaatgcaggaagcacatccggacgtagatatttatatcggtgcactggatgatcatttaaatgagcatggatacattgttccaggtcttggcgatgccggagacagaatattcggaacaaaataatccattcgggattccatatttttctgagaggaatatgtatgagtgaaaaacgtaaagattacattagctgggatgaatattttatgggcgtggcaatgcttaccggcatgcgctccaaggaccctaacacacaggtaggggcgtgtattgtaagcgcagaccataagattttatcaatgggatacaatggactgccaagaggctgttcggatgatgaattcccttggggacgggaaggtgctccgttggagaacaaatacctgtttaccacccatagcgagctgaatgcaattttgaactaccggggcggaagcctggggctggaaggctcaactatctatgtttccttattcccgtgcaacgaatgtgccaaggcgatcattcaggctggaattaagcggattgtgtacgacagcgacaaatacgatggaaccccttccgttgtcgcatccaagcgcatgttaaaagcggctggagtcgtgatgcagaagtatgaacataccaaccgggagattacgatcagactttagccacaagccatagaaggacagcagagaggagaacatcacacatgaagaatcagaaaaaagtgtttcagtcactgacactgattttacagtttgggctgaatatgatcgttcccattgtactttgcatgatgttcggcatatggctcggcagaaaatacgatattttgtggattacgatcccgctttttgtcataggtgcattggcgggtttcaccaatatttacaagatggcaaaaaagatttatggattaggcagaaaagacaggaagaagtaagatgttaaagagactaaacgatgcattaccagagcttgttctaggtattatattatatgggatcgtcgtggaactggcaggcgtatggtttgtgacagacaagctgcggtacacaacgggactggtgatcggaatcgcactggcagtgggaatggcagtcaacatggcagtcgtacttcgggatgccgttgagatctatggcggagagcatgcacaggcaaagatcattgctaagtcgattttgcggtatgtgatcgttgtgatcgtcttttttgtcatgatgaaattcgatcttggtaatttatttaccgcttttatcggtgttctgggattgaagatatctgcttatcttcagccttttacacataaatttgttttaaaactgcagggaagagcggagacaccttccggaagcagcgacaattaaaaacgagaaaggaggaggtgagaacgtgagtaacgcaatcctaatgtctggtggagcggatgatattgactttatgatccatggactgttctcctatcagctgtttggacatacggtgtggatcactacgtcgcatgtatgtatccttctggtaatgcttgtgatccttatatttgcgatcatagcgaaccggaagatcaagcacgcaacagaagtgccggatggttttcagaacgtgatcgagcttctcgtagagaagttagatggaatcgtcatgggaacaatgggaaagatagccggaccgaagttttcaaattatatttgtacgatcttcgtctttatctttatcagcaatatctccggtctgtttggcttaagaccaccaacagcggactatggtacaacacttgcacttggtcttattacatttttcctgatccatatcacgcagttcaaaaatctgccgttgaaacagatctgggtagacatgtgttcgccattaccaccatggctgcctatttggttcccaatcaatgtgatcagtgagattgcggtaccgatttccctgtcattacgtttgttcgcaaacgtattatcaggaaccgttatgatggcgcttgtatacggcttattgagcaaaattgcgattatctggccggcagcccttcatgtgtactttgatttgttctcaggagcaattcagacctatgtattctgtatgctgacaatgacttatatcagccagaattacgaacaagagtagaaaaggagaattcaatatgaatattacaggacaggatttaattttagcatgctcagcaatcggagcaggtttagcagttatcgcaggtatcggacctggtattggacagggtatcgcagcaggacatgcagcagcagccgttggtagaaatccgggtgcaaaaggcgatattatgtcaaccatgcttttgggtcaggctgtagcagagacaacaggtctttatggtctgttgatcgctatgttattacttttcgtaaaaccattagtataagaggttttggaaaagctaaaataaacggaaaggaggccagaccttggaggaaatgacaagactttttaatctggatttccagcttctgcatgataccgtacttcttgcaatcgctattttcttcctgtttttagccctgtcatatctgttatttaatccggttcgtaagatgcttaaggacagacaggagaagatcgctacagatattgatacagcaattgcagataagaaagatgctgcagcattaaaggcagagtatgaagcgaagctgaaaaatatagataaagaggcagaacagattttaagcgaagcccgccagaaagctttgaaaaacgaagcaaaaattgtggacgaagccaaggaagaggctgctcggatcatccagagagcgaacgaggaagcagagctttccaggaaacgtgcaatggatgaggtaaaacaggaaatgatcacagttgcatctatgatggctgcaaaagttgtagctgccaatattgatgctacagttcaggatacgctggtagaagagacattgaaagaaatgggtgaatcaacatggcaaagctagtatcaaaaacatacggtgacgcattgtttgaggtggctttggagaaaaaccagcttgatgagttcctggatgaagtcaaagcggcacagaccgccattgaagaaaacaaagaactcttcaaattaatgagtcatccaaaaatcgtaaaagaagaaaaaattaagatcatcacagacatttttacaggaaaagtttccgaggaacttgtaggacttctccgtatgatcgtggataagggacactttgaacaggtggacagtgtattcaattatttcattgatgaggtaaaagaatacaaaaatatcggaactgcttatgtgacttctgcaatggaattatccgatgcacagaaggcagcagtggaaaagcggttattagagacaacaaagtatgtgaaatttgaaatgcattatgatgtcgattccgaactgatcggcggaatggtgatccgtatcggcgacagagtcgttgacagcagtgttcggaccaaattatatgatctgacacgcgagttatccaaaatacagttgaaagcaggtgaatgcgcttcatgaatttaaaaccagaagaaataagttccgtaattaaagaacagatcaaacgttatgcagcgcagttagaagtagctgacgttggtaccgtaattcaggtggcagatggtatcgcacgtattcacggtcttgataatgcaatgcagggcgaacttttggagttccctggcgaagtatatggaatggtattaaaccttgaggaagataacgttggtgccgtattactcggtaaccagaagaacatcaacgagggtgatactgtaaagacaaccggacgagttgttgaagttccagtcggggacgctatgttaggacgtgtagtcaatgcattaggacagccaatcgatggcaaaggacctattgaaacagacagataccgccagattgaacgtgtcgcatccggtgttatttccagaaaatcagtagatacaccattgcagacaggtattaaggcaatcgattccatggttccaatcggacgtggacagcgtgagctgatcatcggtgacagacagaccggtaaaacagcgatcgcaatcgataccattatcaatcagaagggacagaacgtaaaatgtatttacgttgcaatcggccagaaggcatctacagttgcctctcttgttaagacattagaagaatttggtgcgatgtcttacacgacagttgttgcatcaacagccagtgaattagcaccattacagtatattgcaccgtacgcaggatgtgcgatcggtgaggaatggatggaagcaggacaggatgttctcattgtttatgatgatttgagtaaacatgcagctgcataccgtacactctccttgctccttaagagaccaccaggacgtgaggcttatccaggtgatgtattctacttacactccagactgttagagcgtgcagctcgtctttctgataaattaggtggaggttctttaacagcacttcctattatcgagacacaggcaggtgacgtatcagcttacatccctacaaatgtaatttctatcacagatggtcagatctatctggagacagagatgttcaactccggtttcagaccagctatcaacgcaggtctttctgtatcacgagttggaggttctgcccagatcaaagcgatgaagaagatcgcagctcctatccgtgtagagcttgcacagtatcgtgagctggcagcattcgcacagtttggttccgagctggatgcagatacaactgagaagcttgctcagggtgaaagaatccgtgagatcttaaagcagcctcagtatcagccaatgccggttgaaaaacaggttatgatcatttatgcagctaccaagaagtatctgatcgacattccggttgagaagattcttgattttgagaaagcattatttgagtatgttgatacgaagtatccggaagtgcctgaggcaatccgtactgaaaaagtcatcagtgatgagacagaagcaaaacttgtaaaagcaattgaagaatgcaaagcggactttttaaagtaggcggagggaggtttttcttatggcctcaatgaaggacattaaaagaagaaaaagcagcatacagagtacgcagcagatcaccaaagccatgaaacttgtttcgactgtaaagttacagaaagcaaagggaagagcggaacagacgaatccatattttaattatatgtatcagactgtcagctctatgcttgcaaagtccggaaacattaatcatccatatttaaaatccggggaatccacgaaaaaggcagtggttgtgatcacgtctaaccgtggacttgccggaggctacaattccaatattgtgaagctgatcacaggaagtgatctgaacaaagacgatcttctcatctatgcaatcggtaataaaggacgcgaagccttagagcgccgcggttaccatattgagttagaggattctgcaatgatcgaatctccttcctatgaggatgcatcagctctttgcaaaaagatactgaaatcattcacagacggcgagattggcgagatttatcttgcatacacgcatttcaaaaatactgtcagccacgagccgaagctgatcaaactgcttccggttgagatcaaagcaggggatgtagcagaggatacagattcgaatgttcttatgaattatgaaccgaccacagaagaagcgttagacatgatcattccgaaatatgtcaccagccttttctatggcgcattggtggaagctgtagccagtgaaaatggagcgagaatgcaggcaatggattctgcaacaagtaatgcagaagaaatgatcagcgatttgactctgaagtataacagagcgcgtcagggtgctatcactcaggaattaactgagatcatagccggcgcgtcagcgatttcctagatacgcaagctgcgtattcaggaatagaaaataaataaacaaggagaaaatatagcatggcaaataatataggtaaaattacccagattattggtgccgttctggatattaagttcacagaaggcaacctgccagagatcaacgatgctatcaaagttcctaccagagatggaaaagaactggtagtagaagtatctcagcatctgggtgatgatattgtcagatgtatcgccatgggatctacagacggactcgtacgtggaatggatgcaatcgctacaggtgctccgatcagcgttcctgtaggtgagaacacactgggacgtatgttcaatgttctgggaaatcctattgacgagatcgatccaccaacgggtgttgagacatggcctattcatagaaaagcacctgcatttgaagagcaggcaacttctcaggaaatgttagagacaggtatcaaagtcgttgaccttctctgcccataccagaaaggtggtaaaatcggattattcggtggtgccggtgtaggtaagaccgtattgatccaggagctgattcacaatatcgctactgagcatggtggatattctgtattcacaggtgtaggtgagcgtacccgtgaaggtaatgacctttactatgaaatgaaagaatcaggcgttatcgataagacaaccatggtgttcggacagatgaacgagccaccaggagcacgtatgagagttgcacttaccggtcttaccatggcagagtacttccgtgataagggtggaaaagacgtacttttattcattgataacattttccgttttacacaggcaggttccgaggtttccgcgctgttaggacgtatgccttcagccgtaggttaccagccgactttgcagacagagatgggtgcgcttcaggagcgaatcacatctaccaagaatggttctattacatccgtacaggcagtttatgtgccagccgatgacttgactgacccggctccggcaacaacatttgcccacttggatgcaacgaccgtattggagcgttctatcgcagagttaggtatctatccagccgtagacccattggcatcaacttcccgtatccttgatcctcgtatcattggtcaggagcactttgaggttgcccgtggagtacaggaaattttacagaaatacaaagaacttcaggatattatcgcaatccttggtatggacgagttgtcagaggatgataagcttgtcgttaaccgtgcgagaaaggtacagagattcttatcccagccattcttcgtagcaggacagtttacaggtctggaaggaaaatacgttccaatcgctgagaccgttcgcggattcaaggagatcctggaaggaaaacatgatgatgttccagaaagttacttcttaaatgcaggaagcatcgatgaagtacgcgctcgtatgaacgcttaaggtggaggattattatggcagaggaaaataagatttttaccgttgagatcatcactccggatcgtgtattttacaagggtgaaggagacatgatcgaatttacaactgctgtcggtgaaattggtgtttacaaaaagcacattccactgaccactgtgttagctccgggtgttgtgaagattcacaagacaggagaagatgacgtgatcgcagcagtgcattccggttttgcagagattctgccagataaagtaacccttcttgcagagattgcagaatggccggatgagattgataaaggtcgtgcagaagcagcgatgaagcgtgcagaagaacgtctcgcgaataagaccgaggcgatcgatgtaaagcgtgcagagtttgcacttcgcaaggcgcttgttcgtcttgatattgcaaaataaaagaaaaactggaaattccccagagagtgttatctgctttccggggaatttttaatacaagacaagagaatgtttacgtagcgtacattcttttgtatatgacaatgcagtggtaaaatctgataagcaaagtttaatatcaaaacataaggaaagggcagggcaatcattatgaaaataacaattgcaagacagtgtggaagtggcggacatgaagtggcagaggctttggcagagaagcttcatctggagatatttgacaagaaaagatttgtggaagaagcaaaaaagagaaacgtctatgatgaaaatgccaactttttaaatgaaaaaccaatcgacagttttctttacagtattgcgatgagctatggagcaacaaatccgagagaccgctatattgattttgtaaaagagctgacagaacaggaaaattgcatcattatcggaagatgtgcgaattatatttacagagatcgcaaggactgcgtttccgtttatctgcatgcagacagagcagtcagatgtgagagaatacagaaacgggatcagatatcagagagagaagccctgaaaacgattcaggaagttgatgagaaacgtgctgcatttcaggaacagtgcacgtctaccaaatggggcgatggaaacgagtacgatctctgtatcaatactggcataattggaattgagtatgcggtggagatgattctggagtatattaggtttaaaagggtataagtttagcaaggaaattgttgtttgaaattaaagggagtttgtcagagaaatcatacttgtacgttctctaatatggaataagtcaaagtaagtgcaacaaaaatgttgcacttaccttaaaaattcacctaacttaccactctggggtttcagctttaaatcctttgtttttaagacagatttttctaattcactatctttttttatcaataactcaaactttgcacataaattttagctatgcaccttgaaaattcaatacctggcagttatttggttgtcaatgttcagactttatgcagcttgcttttgcaaaatcaggagtattccgtcctgtgatcagattcatatacatgcttctgttagaaaaaatcagcaggaacaggtactggaagatctccattacaggaacgcctttctttttgtaggcatttgaggctttcaaagcggaggaaacatggaatcttgtaaaaatcttttgatagaatttgaaatctgcttatcattttgagtcgcttgcgttatacttttattcatagcatgagtctccgaaagtatgattgtttctgaacaactcaattataccaaaacctgatggtttcatgttatttttttgccagttattattgaattttcaaggtgcgtaggcacttattcaagtgcgaaggttgagttattaaatataggctattatcatagggaaacaggttggaaaagttgaaaaaagcagctcaatttgggttggaaaaatcaccgtttcggctgataccgcatatccgacacattatacaccgtgataaaagcgagtggatcttcatggctcatataattcattaatttctgatattcagatttatctacaatggtaataatctcattccgcttctgcatattgtaagctccgatagattcataaatggtagctccgctgtggagatcatttatgataaactgtcgaagtgcttcttctttttccgtgataatgcagactctgcgctttatattatggttaaaaataaaatgatccagaataattccattgaagtaagttcccaaaatactgagtacgaccgttttcttgtcgtaaacaagagcagccgacaatgcaacacacattccggaaagtgacattgcttttcccagatccatatgaaggtatttgttcatgatctttgcaacaatatccagaccgccggaggaagcatttcggttgaataagatacttaaaccgatgctgacaactaaaatatagcagagcacgtccaactcctgactaccggtcatagaggtgttgtcaggaaaaagaatctcaaaaagtccaagaaacagcggaagcataatacttgtgtaaaccgtttttacaccgaattcttttccacaggtaagaaagcctataattaaaagtacaacatttaagatcattgtgatcgcagaaagctgtaacggaatgaagttggacaggatgattcccagaccggaaatactgctgacagacgcatggcttggcaccagaaaaaagaaaactgcgacagcgataatggcgactgcgacggttaaaatcagggtttctttgatcagttcaaaataatttatcttttttgacataggaatctccatttctgagcagcttattcgaaaaataatgcaaaatcagttgaaaagctgttttttcataattgatatttataaaaaatacaggctgcattcagcttgttattttaacatacgtcattataaagtacaatgaagaacccaatataaaatgcaatgtgataggaaacaaaaaagttggaaaagttgaaaagtaaagtaaactatactaaaaatgcaaagcgagctatgcagaatgaagtataataaaaaaaggaatataaccggatttgaataaatacaagaaaggggcacacctgtgaagaataaaatcagggaacttcggaaagcaaataagctttcccagggagaattggcagatattgtaggaacaacccgacagacgatcacatccatagaagtaggaaagtatacagcgtcgttaggattggcgcaatcgtaatagcaggaaccaacgcctttttcactggttacagtaatggttccgttcatcttgtcggcaagtgaccggacagggcttcttccatgtaatcagggcattgcagcgtgagaa

SEQ ID NO: 14308 - DNA, 3690 bp, Unknown
  gut microbiota DNA sequence
aacaggagtgcttgatacggatcttcaggtcactatggaccaggagaaaatagatgctttaaacgaacagatcctgagcaaaatagatgcacagttcacagatgcacaggcagagttagacaaggcatcctcccagatcaacagtggtaaaaagaagctttccgatggtgaaaaagagatgggaagccagcttggagcaggcgaaaacgagatcatcaataataaaatccagctttttaatacagaggcagatctgacaacacaattatcagatcttcagaaatcccagtcgtccatggatggtgcaatcaagtctttacagtctgcttacgaaggtgcaacgcagttacagagcgcgattgacggtttgcagaaggcaaaagacggagtggcacaggcaaagagtggggcaaagcagttgtatcaggcacacgacggtgttgtggcaattttaagtgcaaaaaaccctgttactggtgcagatatgtcagtagatgaggcacttggggcagccgttcaatatggtcagatgacgcaagaacaggcaaatcagttaaaaacagtcattacaacactgcaggcagatcctgctatgttggaagcatataaaaaggcaaccagtgaatccgacttcgtctcctacatggaatccacagccattgcccagatcaatgcacaggcaggtacaaagtatacaagcgagaatgacattgcaagccagatcgtgaccttacagtccaaactcgacgacatcaatgttatgctgatgagtcaggcatcctcttttgcagatgcaggtgtgacgctgacttcttacaaagacattcctgctgcaatcgcaaaattaagtgagagcaagacgcagatcgcaaccggaattgcgacaatcgaatctgcacagacacaggtggcagacggaaaaacttctttggatgatgcgttagttactttaaatgaatcccaggtatccggcattatggagatgagcaaaggctatgcggatcttgctgttgcagcaaataagattgaagaggggcagagccagttagatgatgcaaaagagcaggcaaaagattcagcgaatctgaacacgatccttacaatggataccttgaaaaatcttctgactgcacagaacttctccatgccggcaggttatgtgacagaggggaacgagcagtatctggtgcgggtcggagatgaggtgacatccaaagctgatcttgaaaatctcgttctgatggatcttggcatggatggtatcgaaccgatcagattgtcagatgtggcagacatcgagtacattgacaactccggtgattcctattcgaaagtgaatggcaatgcagccgttatgctttccattgaaaaacagaccggatattccaccggagatgtcacagacagactgttggaaaaatttgacagcctgaaatcagaaaatgcacaattacatttaagcgttctcatgaatcagggcatttatattgacatgatcgtgaaatcagtcgtagaaaacatgatcgtgggagccatccttgcaattattgtattgttattatttttaaaagatatcaaacctacacttgtaatagcatgttccattccgctcagtgttgtttttgcagtggtactgatgtactttacgaatattacgttaaacatcatttcactgtcgggtctggcactcggaattggtatgttggtggataactccatcgtcgtgatcgagaatatctatcgattgcgcggggagggatattcgattcgaaaggcagccgtggagggtgcttcacaggtgacaggagcaatcatagcatccacacttacaaccgtctgtgtatttgcaccgattatttttacagagggtatcacaagacagttatttgtggatattgcgctgacaattgcatttacgcttgcagccagccttctcgtggcattgactttcgtgccgatgatggcggcaggattattaagaaatacaaaagagatcaagcataatttctttgacaaagtaaaagaggtttatggaaaaattttagcagtatgtctgcgttttaagccaatcgtatttatcgcggtgatcgtattgcttggaacaagtgttgtggcagcattctccagaggatattctttcatggatatgaatatggagacgaaccagatcagtgcgacgatttcagcaaaagaggatgagacgcttacttttgatgaactgacagaaatggcagacgaagtcgtggaaaaagcattgacgattgatggtattgagacaattggtgccatggcaggtggaagtgcactttccatgatgggaagcaactcaacagacagcatttccgtgtatatgattctggatgaagaatctgaagtgagcagcgtagatgtgaccgcacagttggatgaactgaccaaagacatggactgcgaggtgacaacagacacctctgcttctgatatgacatcacttatgggaagtggactgacgatcaatgtaaaaggaaatgatctcgacaaattgcaggaacttgcaggcgaggttgcaaaagtcgtagagaacactgagggaactgtggatgtagatgacggacttgacaacacaacaccgtcttttaccatttctgtagataaagaaaaagctgcaaaatacggcatgaccgttgcacaggtattccagcttgtttacggtgagatggcatcctcaacatctgcaacgacaatctctaccgatgtaaatgattatcaggtttatgtacagagcgaggagcagttcgatgttacattggatgatatcaaaaacctgacctttacctatacagacagagaaggaaacgagacagaagtagagctttctgatattgcacagtttgaggaaggttacacattaggaacgattaaccgtgatgcgcagaccagatatatcagtgtgaccgcaggagtggatgatgaccataatgtcagtctgctgagtaatgagatccagaaagagttagataagatcgatctgccggaaggatactccattgagatggcaggtgaggatgagatgatcgcagatgcgatgaatcagttgtatctgatgcttcttttggcggtaatcttcatttacctggtcatggtagcacagttccagtcgctgttgtcaccgtttattattatgtttacgattccgctggcatttacaggcggtctgttcgcactttactttaccggtaacgaagtcagcgttgtggcaatgatcggatttgtcatgctcgccggaattatcgtaaataacggtatcgttatggtagactttatcaatcggctccgccgaggtggaatggagaaaaaagacgccattatcgaatccggaaaaacgaggcttcgcccgatccttatgactgcactcaccacgatcttatctatgtcaacgatggcagtcggacttggagaaggttcagaaatgatgcagccaatggcaatcgtaacggttggcggtttgttatatggtacacttttaaccctgatcgttgttccgtgtatttatgatgcattcaaccgcaataagagcatggtcgaggaggaattataatggatgagcagaaactgatccacaatccaccacagaaagtgcttgccctgtatcaggcagtcattgagttcattaatgaaggctgtgatatcaacactttaaaagtagctgat

SEQ ID NO: 14309 - DNA, 91668 bp, Unknown
  gut microbiota DNA sequence
aagcgaatgttactatgaggagccgtatgcgggaaagccgcacgtacggatctgtgaggggctaagattgagaggtcttagtctactcgacttacattgaaaggaaatgaaaatgaagataaataaagaacaatggaaatggacaagagaacctaaacagtattcaatatcagaggataagattgagataattactaatccgcatactgatttgtggcagcgtacttattatcatttcaggaacgataatgctcctgtgcttcagatgaaaacttctgagaaattcttttccttcgtagttaaaactgaatttgagggcaaggtgcgttttgaccagtgtggtattgtaatgtaccttgatagtgagaactggcttaagggttcaattgagtatgagaacgaagaatttcagcatttaggaagtgtagtgactaataatggatattcagattgggcaacaaccgaaatagatgcaggaataaagtctatgtggtatagatttagtagacgagaggatgattattgtattgagtgttctgaagatggaattaagtacaagcagatgagaatttgccatgtgtataaagctaatgatgaaatacagtttggaatttatgcttgtagcccagaaaattcatcatttaaggctacatttacaaatatggaattaacggaatgtaagtggttgacacatgatggacaggctcctgatgaaaaatagaaaatccagtttgtctgactaacaataatttaataatgaactaatacaagcactttaagcatggattcaaaaaaaaggaaggtaagatagatagaaaatgttattagaagaatttgacgcaaataaaactgcaatcatcaacccagatatgtgtgtagagaagattgaaaattttccggaaattacgatttcctgtttttcagaagaacttttcaatgaggtactggaattttttcagttcttttatgcaggagataaccttgaccattcatcctgggagccgagaagtatatcaggcagcacaagattagatgaaaagagtaaaatcatgctactggcctttgagcttggttttaaaatattagaaaaattgtagaaggaatattagttgttaaaccagaaaacaaatgaagtaaaggagcgtccagaacttaaaatatgacaggaaagtccctgcgtgttcgataaggagcatgcgagattctattttagtaatggaaaacttcgtcttttgcatgaatataaatgaaaaatcttagggtatgaaaagaataatgcgtagacgaatcacatatgctaattagcattatggggatctgcgtggaaaacgaaagataatgaacggggatttgcgtagaatacgcatttacacgagtggggatttgcgatataatttgtaaaaatagtatgatttttgaaaggtgtattccattatctggtggagaggagatacttttatggctgaaacggtttttaaaagaaaactatatgatgaaattcttgaatggaaaaagaaccgtagtgacaaatatgcactgcttattaagggggcaagacgtgttggaaaatcaacaattgcggaagaatttgcaaaaaacgaattcagatcctatattttgatcgactttgcacatacgagcaaagcaattctggaattatttgatgatacttataatttggattttttctttctccaattacaacagttgaccggagtcagactgtatgaaaaggaatctgtgattatatttgatgaggttcaattattgccgaaggcaagacaggcaatcaagtatcttgtggcagatggaagatataaatacattgaaacaggatcactcttatctataaagaagaatacgaaggatatattaattccgagtgaagaacataagatatccatgtatccgatggattttgaagaatttttgtgggcggttggtgatgaaatcacggcggataccattaagctgcttttaaaaaacaaaaaatctgccggaaatgcgatgcataggaatctgatgcgtatgttccggttgtatatgctgatcggtggaatgccacaggcggtagaagcatacttagaacacaataatctgcaggtagtagatgaggtaaaaagggaaattgtcgatttgtatgaggaagattttacaaagatagatggaaccgggcttgcaggtgatatatacgatgcaattccggcgagtctcagcggaaatgcgtcgagatatgttctgtcaaatgcgagggagggaacacgtctggaacaggttcgtgaattaataccggatattcttagttcgtatactgtaaatattgcatatcatgcaaataatccgggagtaggaatgtcactggaaaaagatgccggacggtataagctatttacctcggatgtcgggttgtttataacactcgcttttaaggataaaaactatacagaaaatgtcatttataataagctgctatcggataaattagaagcaaacctcggatatatatatgaaaatgccgtggctcagatgttagttgccagaggaaacaacctgttttattacacgatggaaagcgatacatcgaatcacctgtatgagatagacttcttgttgtcaaaaggggataaaattaacccgatagaagtgaagtctggaaactacagagggcataagtcgttagatatgttttgcgataagtatagcagtcgcatcagagataagtacgtggttcatacgaaggattataaatgggagaatggcatccattatctgccagtatatatgatcccatttttgtaaaatccttaccatttatgctaaaaaaagcacagattatgcaaattttctccatagagaaattcttatgttacgattaagacaagtaaagcggaatataaatgcagaaagttattcagaaactgcaaagaagagtttcgcagtccagagagaaagggataagaattatggagaaaatcaaaaacttatggcttggatttgccgagaaacatccgggcgcatcaaaatggatcagagagggtggcttatttgtaattgtaagtaacttaatcacagtatttaagtatttcatgttactgtttttaccacttgcatttgcaggacttccaaatatcgactttggattcccgggaatcgacattacattattcggtgaaacttttaaatggaacatcattggttatgacgcacagcacggcggacttccttacttctgcgcatacatgatcgcaatggtagtcggtgagtgtatcaacttcccaatccagagaagcttcgtattccgaagcaaaggaaacatctggtatcagggaatgtggtatctgatcgcattctgtatcgtaacctgtatcgtaaactcaatcaattgtatctgggttgctgttgcaggaatgttcgtaccagactggctttataacatcggaacaaccgtattaaacggcggagtttccatggtagtattcttctttgtaaataaaatcattttcccagaaggggaagcaaaaaaagcagaataatttaagtattatgtttgagggagttgacacaatcgtgtcagctccctatttctttctaggatattagtggcaggataggtgtggtacatgttataatattcgcgaaggcaaaagtgagtatggaacaatagcaggaatgtcagcgatatgaaataaaggagtattttggttaaagggggagcgaggttatgctaaaaatagcaatcgtagaggacgaacgggtgtgtcaggaagcacttattgaacatctgagaaaatacgaaaaagagcataacgaagcatttattgtaagagttttcaatgacggaattgatattttggatgattactcggcagactatgatctgatcctgcttgatatccatatgaaacatcaggacggaatgacaactgcgaagaaaatccgggaagtggatgcagatgcacagatcgtgttcattacagcgcttgcccagtatgcgattgagggatataaagtaaatgcgctggattttattttaaaaccggtcgtttataaacagcttgccatgacaatggatagagtgcgttccattgcgtcaaagcatcacaaggagaagcagcttttagtcgcagagggcgagagcaagtgcaaaatatctaccgaggacatcctatatattgaggtgatagggcatgatatgtttttccataccagagataaagtgtattcgaagcatggaattacgttgaaaacaatggcggatgaactatcggaatactattttgtgaaaagcgggcagtcgcagcttgtgaatctgaaatatgtggatgaagtcaaaaaagacactgtctacgtgagcggaacagaaatatttttaagccgcagccggaaaaaagagtttttggaagcacttgcagattatgtaggaatggagatgtaatatggcgggatcactgtatttttgggaaatgcttctcccggcattaggactctgccttccgttaaaccgcagagaaaaaagtctgtggaaagcagttgcatgcatgattacaggtgtagttctattgacggttattatgaaactggcgcagacaaaatatgagggtacactgatatctatgggagagaatatcatgttttccatgatgatgttaggctggtttcttgtgatatggagtcttgtgatcgggtgcatttatttttttgtgcagtgcagtctgcgtgaggcaatgtatatttttgcattaagctatggtgtggagcatattttttactgcatcaggcttctgacagaatggctgacaggcgggcgcattggcaatactgacccattgatctatcttccgtgtatggtcggttcctttcttctcgcatatttctggtttgcgaaaggcgctgcatatcagggaacctatttattggaggggatttcagcgtccacttcgtccattgtcctgattgcggtcgtgtggggactcagtattgtggcaggagaactgaactatgcgcatattcacagtatttatgcaattccgtgctgcattttcatgttatcaagccagagggaacagcttcgtcgcgagattgaacggacggaatttacgaaaaaagagcagttgtgggaaaagacgaagctgcgctacgagatgtcaaaagagagcatggcagttgtgaaccagcattatcatgatatgaagcatcagctcatggcgctttccaccatgagtgatgaagacaaacgaaaagcgaagcttcttgatatggagagcaggattgccgcgtatgaagcagtagtaaaaaccggaaatgaaatcttagataccgttctgacagagaaaaaactgacctgtcagatcaatcatattgcatttagctgtattgctgacggagcgcagctttcatttatggatgagcttgatatttatacgttgtttggaaatgcacttgataatgcgatcgaggcgaaccggaaaattgagaatgcaaaaaaccggtggatctctgttcagatacagaggaaaaagggaatcattttgatcgagctgatcaacccttatcagggaacagttgattttgatgagagcagaatgccggttacttcgaaggctgacagggaaagccacggttttggaacaaagagtatccgttctattatagaaaaatatgacggacagatgatcatcaagacagagggacagaaatatctgatccgcatgatctttcagggcaaaggttgaccaaatatgtcttaaaaaatgcaggctgcgctaaagcctgcatttttgttataaattgtagtatcttctttttacagatataagggcagtgcagatgaaagcagaaagttaatcctcccaagattaaaataaaacgcttcatcctgaattgcccggacatcatgtaaacaggaggaaagatatgagtaaagcaagaaaaattgtgggaacgacaatacgttccattttgatcattgtatttgcagtgatcatcgcagcagtgaattccattcttccaaattatgcgagaatgatggacagcatgattggtggaatcaatacaaaaattgacaattctgatgttgatacaacaggacttgatcttgagtacaacaaggcagattatacgacagataatatcggagaggctgagagtgcgctccaccagcagatcgctgatgagggaacggttcttttaagcaatgagggaatacttcctatggcacaggatacagagtttagttttttcagtgtcaattcggcaaccgtatcagcaagcgattccatgatgggtggaagaaacctgacacagatttttgagaatgcaggagcaaaaatcaatacaacattaatggatttttattccgaacagtccaaggaatacggactcagctcaggttctgtcagctttggtgacgcagaggattttgcaattaacgaagtaccattatctgtattgcaggaaaatgcagaggttatggagtctgtaaaaaatacagtgcctgtttatttcttaaaaagagtggcaggagaaggacgagatatgcctcgttccatgtataaccatgcagagagcgaagaagacaaggcaaagagttatttagagccggattcgacagagttagagattatctcttatttaaatgataacttcgataatgtaattcttgtaaccaattccaatgctgcattagagcttggctgggtaaaggattatacaaacatcaaggcagtactttcaagtacaacgattgaagcagtcccatacattctgactggtcaggtaaatccttccggaagaacagtggatacttttgctgcagatgcgtccaaatctccggcagcacagaattttggtgattaccagtatgtggatgagaatggagaacttacaaagtacaactatgtaacctatgaagaaggcatttatgtaggttataaatattatgagacacgctatgaagacgctgttttaaataagggaaatgccggagattacgattacacagaggaagtggtttatccatttggatatggactttcctacacaacctttgactggtcgaatatgcagacaacatggtctggtgacgagtgcatcgtgactgttgatgtggaaaacaccggagatatggcaggaaaagatgtcgtagaaatctacgcacagtccccatataccgagtacgacaaagcaaacggagtagagaaagcttccgtacagcttgtagcctacggcaagacaagcgaacttgcaccgggcgagaaagagacggtaacctgtacattctccaaagagcagttaaaagcttatgatgaaaacggagcagagacatatatttttgacgcgggtgattattacatcacagcagctgctaacgcacatgcagcaattaacaatattcttgcggcgaaatctgagaagccagctcaaaaagcagacttagacagtgaagaaacagcagataacgaagaatctgcaactcaggaagaggcagaaagcaagatagagcttttgacagcaggtggactttcagcagaagaagccacaaccggcggaaatgcagactttgtatctgtatacacaccagataacacagacaccgatgtgacaacctacgcaacagattcttactcgggtgtgacaatcacaaaccagttacaggattgcaaggcagacgtaacttatctgacaagatcagattgggagggaactttcccgacacatgacggagaggcaggaactcagatcagtacctggggaaatgagatcaatggtgaagatggagtttcctatacatatgtgaaaacagcgtccgatgatctgatcgcagagcttgacagcttttcaagcggtacagatgttgctccggagacacttgcagacacacagattgtctatggtgcagataatggattaacgttgattaacatgaggggacttgattttgatgatccgctctgggatgaccttttagatgaactgactgcagatgagatttataatacgatcggcgtgtccggttatggtattgaatacattgattctgtagaaaaaccttttaatattgatgcggacaccgcagcaggattgatttatggtggtacaggagcaatgttcccaaacgcaatgacgcttgcacagacatggaacttagaccttgccagtgaatatggaacaatgatcggaaacgaaggattgctcggcggagctgatggctggtatgcaccatccatgaatatccacagaacaccatattccggtcgtaacggagagtactattccgaagatgcattcctctcaggagccgttgcctccagagaagtttacggagctgcttccaaaggtatgtatacttacatcaagcattttgcattcaacgatcaggaaaaccatcgtggtgaccgtgacggacaattcagtgttgccacctggtttaatgagcagtctgcacgtgagatttatcttgtaccgttcgagatgtgcatgaaggctggagatgttactttaaattatgtggaaaaacaggaagacggaacttatgtcaatgcttcaaaacagatccgcgcatcccagggtgtcatgacttccttcaacagagcaggtgctacctgggcaggcggtgattatggtctgatcacaggcattctccgtaacgaatgggcatttgacggaatcgttatgacagacaatgcgaatacaggtgtattcatggacggttaccagatgacagaggcaggagctgatgtgaaacttacaacacttcctgcatccgcaagatataactttgatgagaatgatccggcaacttactattatgcaagacaggcaatgcatcatacactttataccattgcaaactgtaaagccatgaacggagcaatgccgggttcccatatcaaagacggaacaagaatttcaacaacgatcatgcgtgtagttacaattctctttggcttgctgatcattcttgaagtatacaagattttccggttattcaaaccaacacagaaaaaacttgcaaagcttcaggcaaaagctgagaaaaaagcacagaaaaaacagtcttaaaacaaacatgacttctttacatcaatgtaaaatttatgtaaaatagtaaatacaaaaagagcagaactgcgatcatatatatggaagtagttttgctctttatttttactggaaaatatgaggcgatgggagacagtgtatttttcggggaatagcaaaggagagaaaaatatgagaaaaaactgggcagcattggcactcacaggcatgttatgcctgacaacttttgcaggaacacagactgtttccgctgagacagcagattccgcaaaacaggtggatattgtattcacacatgatacacattcccacctcaacacatttacgactattgtagatgaagcggaaaaagaagtgggaggatttgcgagaatcaacaccttgatccaggagcagaaagcgaaaaatcctgacacactggtgatagatggcggtgatttttccatgggaaccctgatccagactgtttttgagacgcaggcggcagaaatccgcatgttaggctatatgggatgcgatgtgaccacactcggaaaccacgaattcgattaccgctccaaaggacttgcaaatatgttgaacagtgcggcggagtccggggatgatcttccggcaatggttgtctgcaatgtggactgggaatccatggaggcagcaggcttaagtgagggacaacagctgatcagagacgcatttgatgagtacggggtcagtgactatgttgtattggaaaaaggggatacagacatagctgtcgtaggcgtttttggtaaagatgcacttgcctgtgcgccgacctgtgaacttttattcaaagatccaatcgaggcggtaaaagaaacggtcgaagagatcagggagaacgaggatgttgatatgatcgtctgcgtttcccacagcggaacctgggaggatgagagtaaatcagaggatgaaaatctggcaaaggcagtgccggagctcgatctgatcttaagcggtcacacacatacaacactggaagagccaattgtccatggagatacctatgtggtatcctgcggtgaatatggtaagaatctcggcgaactttccatgacacagaaagcagatggacgctgggagatgacttcttacgaaattgtaccggtcacaacagacattgatcaggatgcagagacacagaacgccattgatcagtttatggatactgtggacaccgactatctggcacagtttggctataccaaggatcaggtgttagcggaaaatgacgtggatttctccacacagaaagatctggaaaatatccatgaagaacacaatcttggtgatatcatgtcagatgcctatgtgtatgcggtggaaaatgcagcagattttgatggtgtcccggtggatgtggcagttgttccaagtggcactgtccgtgacacctatgcaaaaggcgatattaccgtggagcaggtatttaattcgttttccctcggaatcggggcagacggagtgcctggatatccgctcatcagtgtgtatctgacgggaaaagagttaaagacagcagcagagatcgatgcatccgtttctgattttatgacaacagcaagactttatagcagcggacttaattttacatacaatccaaatcgcatgatcttaaacaaagtcacagatgtatatttagatgatggaaatggcggcaggatcgaaattgaggacgacaagctttaccgcgtggtcgcagacctttacagcggacagatgttaagtgcggttacagatatgtcctacggtctgttgtcactggttccaaaatacgccgacggaacaccgatcgaagactttgaggatgtcatcatcacagagaacggaaaagagttaaaagcgtgggatgcgattgcaagatacatggagtcattcgaggatacagacggcgatgggatcgccaatgtgccggaatattacagcacagatcatgacagaaaagtggtggatgacagccggaatatcattgatcttgtaaaaaatccaaataaatttacagcaatcattgttggtgtgattgcagtgttgattttacttgtcattttcattatattattaattaagaaaatcgtgaaaaaagtaaaatcccgcaagatgaaaaagtaaaaaattttttccggtatcggtggatcattcagacatacgttggaaagaaagtttacataagtcgggattggcagggagattcaaaatgagcgcacaggacaacatggaaaaggttctcagggaattacatgtccttttatcaaaaagcaatccatatgagagagattctaactatctggtcgtaaataagaaagagatgctggatattttaaaacagctcgcagtctgcatgtcggaagttatggatgagtacgaactgacacagcagggaagggagcaggcacagcgggaaaaccggaagatcggggaagaaatcatcaatgacgccagagcaaaagcagaggacgtttatgccgcgtcggttatgtatacggacgaagcgctccggcggatacttgatattatggatgaggcgaatgagtctgtgaaagcggtctatgacagcatgggcgaaaagcttgcgaatgaaagaaaactggtttccggtgacaagctggaattaaagagtctgttgcaggatcttaaggatacggacaaatacatgggtattattgaggagcggaataagaagatcgcgaaggagaagaaatggaaagaagagggaacagaaccttctccgtatgcagcagtgaagccggagattaagatcaaccgcgattattttgaacagcagggaatctccttggaagaaccggaggaggaacagccggaagaaaaaacagagaaagctgcccctgagattagcgtgaatctggattctgagtactttaagtggaaggagcaggaaggaaaagaaggggatccagaggatgaaaaacagccggagaaaaaaggattctttggaaaatttatgaaataaaattaattgtgtacaacctattgacaaagatgccaataggttgtattttattatacataaagattgaacacaattaaattgtaagcaatataaaaggagagaaaaacaatgagtaaattttatgattttgaagcggaagatgtaatctgacaccaatgcttgaaagtatgctgacaagaacacggccggactatatggagagcgcagatatcaaatggaactttacaaagtttttaattgaccgggaaggcaacgtggtagaacggtttgagccgacagcggatatggatgtggtagaggaaaaaatcagagaaattctataatgttgtaaaaacaacggaaattctgctcccaattgcgtatagtaaagatacaaaaaaaggaaactatatatgaaaataaatcgcacagtatcattgccaaaaggagcgtaggaagtatgaatagagaagagcagaagcaaaccattaaagattacctgaaacgcctcggagcaggcgaggaattggagagtgtccgcgttgattttgtgaaaaaatttcagtcggtagacgcggcagagatcatgaatgcagagcaggaacttatcaaagagggaacaccgatcagtgaagtgcagagattgtgtgatgttcattctgcgttgtttcatggaaaaacaagagaagagcagatcgcaaatgccccaaaagcaacggtagattctatccgggaacagagatttgcaaagacggcggagcttgtgaagattccggggcatccgcttcacacatttacgttggagaacgaagcacttgccaaaacgattaaaaaatgcagggaagccctaaagaatgagcatgtagagcacaagcttatagaagaagtccgtcagcttgcgatccattatgccaaaaagggagatcttctttatccgcatttaaaggtaaagtatgagatcagcggtccgtcggatgttatgtggacggtggatgatgagatacgggatgaatttgctgcgctggcgaaaaaagcggattcacaggacgatgagtggaaaaaacgtttcgaggcggcactcacaagagcggacgagatgatctataaggaagccaatattctttttcctaattgcgcatttaactttacggatgaggaatggtttggaatctaccgggactcaaaagactacgcagagtgttttggtgtagaaaacggagtctgggaggacgcagagaaggcacaggacgtaaagatgtcgtctatcagtcaggatgagattatcatggcaggcggtcacatgaccgtggagcagctgacagcaatgctgaataccatcccactggagatttcgtttgtggacacagacaatatcaaccgctttttcaacgaaggtccaaaagtgttcaaaagaccgggaatggcgattgacagagaggtgttctcctgccacccgccgaagatcgaacagcaggtacgccgtattattgaagaattcagagcgggaacacttgataaagtacctgtctggatggataaaaacggcagaaccatgttagtcacttatatggcagtccgcgataaaagcggaaaatatcttggaaccatggaactggtacaggatatggaatttgcaaaagagtattttcagaaataattaataagtggaaatctccttatgggaggcagcacggtactcgcgtggtctgcttctcataattgttttaaattgttttgaaaaataacttgggttggaaaaaccacagtttaatgcgatctctgtgatgggagcgtcggaatctgtcagcagttttgcggcatggaaaatacggatccgctgcaaatattcgatcggactgtaatgcagatactgctgaaaaatgcgttgacattctctgggacagatatttgcagtgtccgcaatctctgagacagaaatggttttatctaaatttcggtgcagccaggtcagcatttttttcaggcgttcgtcttgtatcggagaaatagaagggctagaatccacggacattttggacaaaacaaaaagcaggatattggacagcgcattccgtacctgaaattcatatccgtagttttcactgatacaggcatggtaggcacagtcaaattcctgaaaatacggagcgtcctcagaggtatcatgaaacacaaagcaagatggaccattttccaacagcgggcgcacgtatttgatgtgaaatacactttctggggttccgcagatcatgtcggtgctgaacacaaaggagcggaacaggcagggagcggcggtttttggaacaacggcatgaatgatctctgtattgataaaacagccctccccggcttgcagttcataggactggtcgccgatacgaaccgtgacaagcccttcgagtagcacaaacagttccagctcaccgtgccagtgaggaggaacatatccgcccatatattcatgcagatccatattattcagggagaggtcaaaaagtctcgcatttttttcaattagttctttgccggatgcatcaatagataaagaaatggaattatttaacataaacacaccgccttgtcgcttttgttatattataagtcgcattttctaaagatacaatggtttttgctgtgataaaattcagaatagagataaaataagtctgcgaatcgttactggaacgaggtacgagggaacagtaacaatatagaaggagaacagcatgaaaaatacagtgatttttgatctggatggtctgttaattgacagcgagatcatttccttccgattgtatgaggagctgaccggaaaatacggacgttccatgacgctggaggaatatgcaacggattatagtggaaaaaccagtcttgcaaatatgaagtttctgttagaaagatatcagctcccaatcacgttggaagagggaatgacttttgtggatgagagggaaaaagagtatctaaaagacggcgttgcactgaaaccgggcgcacgcgaactgctggcgtatttaaaggaaaatcactacaaaatactgctggcaacatcgagcaccgaagaccgcgcagagggaattttgcagcagaatgggattcgtggctactttgatcatctggtgtatggtgtaaatgtgaaacgtggcaaaccttttcctgatatttttctgaaagcatgcgaggatgcaaatgagccaggaaaaaattgtctggtgttagaggacagcgaagcagggattcaggcggcatattctgcgggaattgatgtgatctgcattccggatatgcgggagccgggagaagaattcaaaaagatggtaacagcacagctgatctctttaaaagatgtgatcatctggttgcagaccttacaattgaatagtgttatgtaaactaaaaacagggattattgttttgatgcctccggctgtggtacaatattggaatcatagtcggaggcattttatatgaaagtggtagtagcaattgattcttttaagggaagtatgacaagtgtgcaggcgggaaatgcctgcaaagaggggattcttgcggcggcgcatgcgcactgtggcagtggggcggcagctgcgaaggacaggaagcctgcagcagataatttggatgttgtcgtaaaaccgctcgcggacggaggagagggtacggtggaagctttggtagaagggatgaacggaacgtatgagtatgtgaccgtgacaggtccgatgggaaatccagtgaaagcaagatatggcattctgccggatcaaacggctgtgatggagatggcggaggcatccggcattacacttgtaaaagaaccgttaaatccatggaaagcagcatccacaggagtcggagaaatgattctggatgcagttcaaaaaggatgccgcaaatttatcattggaattggcggcagtgcgacgacagagggcggtatcggaatgttatcggcactgggctatgatttcatggatgaaaacggagacatattgccaccggtttttgcctcgctagaaaaagtggtgcagatagaaaataatcgtgtgccggaagtgttaaaagactgccattttcagatcgcatgtgatgtgacaaatccgctttgcggagtggaggggtgtgtttacgttttcggagcgcaaaaaggtgtgaaggaagaagaaaaagagagcatggacagggcgatgcagtcctatgcggcatgtctggaaaaatttaccggcaaaaagctgagtgacattccgggcacgggggcagccggaggacttgggtttgcgtttctgtggggacttccaaacgtggaactgaaaccgggaatcgacattgttcttgaggcagtcgggctggcaagtgaattgcaggatgcagatatcgtggtgacaggggaaggctgtcttgattttcagacggcaatgggaaaagttccggtcggtgtggcaaaggcagcaaagcaatatggctgtgaagtgatcgcttttgccggaagtgtgacagaagaagccataaaatgtaacgaaaagggaatcgatgcatttttctccatcctgccgggagtgtgttcactggatgaagccatgaacacggaaactgcgcagaaaaatatgcggaatgcggcggagcaggtgttccggttggttttgacgctgctgaaagaaaaatgttacgaataatgttacaaaatcacaagaaaatcacggaaaaatgttacaagagccggaaaaactgatttatgagattaatctgagcggactgtagtaagtgataggaaatgaaaaaacaatagaattccctgcaaaagcgttctataataatcccagataaaaatcaggaggtaccaatcatgaacgatacattaaaagttttagagaaaagaagaagctgccgtaattttaaatcggatatgattccggaggaaacacttgaacagatcgtaagagccggaacctacgcaccaacgggaatgggaaaacagtccccaatcatccttgcagtgacaaataaggaactgcgtgaccagctttcggaagaaaaccgtaagatcatgggagcaccagaaagcatggacccgttctatggagcaccggtcattcttgtggtacttgccaataaggcagttccaacacatgtgtatgatggttctcttgtgatgggcaacctgatgaatgccgcagagagcctcggtgtggcaagtatctggatccacagggcgaaagaggaattcgaatctgatttcggcaaaaaaattcttgctgatcttggtattcagggcgaatacgaagggatcggccactgcgcactcggatatgcagcagagccggcaaaagaggcggccgcaagaaaagagaactatgtatattatatgagataatgattgcatagttgaaagtggtaagtgatttatactatgtaaaataacaaaaagcgttgattttggagaatttccgagattgacgcttttttattcagttataactgactcggttgtaaccgaataaaaattgacattccgaaaaataataattatacttattttataattgatgacaatagaatgtttgtagagcgaacattctattgttggagaactttaggatagcaaaatttctgatgcaggaaagacagggtatcatgattatgaaattttatggcagggaaacagaaagaaaaaaattaaattccatgttttgtacagacggtcagatgatttctctgatctatggacgaagaaggattggaaaaagtgagctgattaggcaggtgctcaaagaaacagaactgaaaagtatttactatgagtgcaagcagacaacggaacagaataatgtagacagtctttctgaactggtaggagaaacattcgattttccgaagcctgcatttgccgatatggagagcctgcttcggttcttatttcggacgtcggaaaaagagccacttattcttgttttggatgaatacccgtatctgcgtgaaaatgtaaaaggactggacagtgtgctgcagtctgtgatcgatgaataccgtgaccgttctaatatgaagcttattatctgtggttcctatgtagatacgatgaaagaacttctggcaaaacagaatccactctatggcaggattgaccttacactgaatctgaaaccgatggattactatgagtcggcactattttatcctgatttttcggatgaggataaagtgaggatttacagtgtgttcggtggaatcccttattataaccggctgatcgatggaaagaaaagtgtcagagagaacatcatagatctgatcgcatcaccaggggcgcgtctggaaaacgaagtgtcaatgtatttaagctcggagatatcgaaaatcacaaatgccaatgaagtgtttgaagcgctggcaaaaggtttttccagatacaaggacattcttgatcagtcacatgtttcgagcggtcctgcgcttgtggatgtacttgacaaattgatacgtatggatgttgtggacaaaattacacctatcaatgatgaaaataatcggaaaaaatcgggatattttatttcggataacctgtcattgttttactataaatatattttcagaaattcatcccgcatgaatatcatggattcagatattttttatgaccgctatattgcagaagattttgaaacaaaatatgtcccaaaagtttttgaggatgtgtgcaggcagtacctcatcagaagaaaccgtaagggattgatggatgaaatttttgaaaaaataggaaaatattattatgatgatccggtagcaaaaaagaacggagaatttgatatagtaacgcaggatgacaaaggctatattttctatgaagcaaaattccgcaaagaacctgtgacagaacagatgatccgggaagagatctgccaggtggaacagaccgggttagagtgttacaaatatggctttttttcaaggtcaggatttgcatgtgaaggagcagacaactgtaaactgatagagctgagagaattatataactaaaacttcccacaccaataaggtatgctaaaccttgaaaattcaatatttcagccaataaaaaaggcataaacctgttccgtttggtataatggagttgacaagaaaccattttacaaaggagatttatgccatgtctagtataccacaaaactattcagatgagaagggaagtaatgttttcatcattgatgacagcctttttgaccgtagcaattgcaagaaaacagaactggggtctaaagtttttgacctcacagatatgcatttcaaaaaagggttccggatgcttactttaagctggagtgatggaaatacactgatctcggtaaacagctgtctgctggcatctgcaaaagatacaaatatcatcggttcggtaaagaactttgataacagaattcttgcaggaaaaagatgtaaacttgctcaggcgaaagcaccggaagcaatgatgactctgctggatacagcactcagttcaggactggaagctgagtatgtcctgtttgattcctggttttccaacccggcacagatcacagccattccagcaaaaggcatggatgtgatcgtcatgatcaagaaaagcagtcgtatcaagtattcctactgcgatgaacagctgaatatcaaagagatatattcccgaaacagaaaacgccgtgggaaatcaaaatatctgctttctgttgatgccatggtgggaaaaggaaatacgattcctgcaaagattgtttgcgtaaggaataaagccaatcggaaagactggctggcatttatctgcactgacagcccatgtggctattgtgtttacccgatatatgctactcgcaacggagcaacgccaaaatgaaaatcagcgaacgcttggcgagttgttcttcttacttgtcgatgaaatggcagacattactttctgcagatcacttagcatcctgatggatgccttaaggaaatcctaaagctcagcaatgagcagttggctgcatttactgctgattttgaatcaagactaccgagatatctgcggaatgcacttcatccggaagcagtagcggcataaaccactattttgttagctgaaatattgaattttcaaggtgcgaatcccattttaggttggaaagccttagtaactaaataataaactggaacttatcaccgatacatagctgtttacaaagattcgtgatagtgttgtcaacgtcgtggatggtacttgatatccggagcagaggataccccttactgatgtttaaagacttagcctcttgggcattagcgaaaacaatatcaagtgttttacgtgaatgatccagaatgatattgcgttttcttagtatttcatataaagatgagtcgtttaaatcttctccaaataaaaaagaaaaggattcaggaaatttattgaactctaagatgacggggacattatccatataacggattctttccactacaagtattttatccccttcgtgtagtgacatttcggttaaatcccgttcagaaggatcttccaatgcaattttgatggtcttagctccaggtgttgcatttttcatccggcacatatcagaaaaacttatgacttctgtaatattacgctgcaattttttttctgctacaaaagtcccttttcctgatttcctttctaaatatccggattcagataaaacggctaatgcttttcggacagtaactctgctcacatggtatgattcgcttaattcattttctgtaggcagacgactgccggccgcccgttctccggtgtcaatttcctttcgtattttttcctccaattgtttgtacagtggtgtggcaatggtgttgtttagtttcatataaatacctctctcctgatataactttcacaaatattataaaacaaatttgtaaaaatgtatatattttcctatattgtatgatatgcattgacacaatgtattatattgtattatagtaaacatatagaacaaataagtacattataaaaaggagagaaaaaatgggatacgtaagtaaagacattaaaaacattgtgaaagaaattttagaagaaaaaaaagacatcggtggaattaaaaatatttattttgtgggatgcggaggatcacttggtgcactttatccggcaaaaacatttatggagagagaatcacaggttttgagatcagcctggataaacagtaatgagtttgtgcatagcacaccaaaggactttggagaaaattctattatatgtcttgcctgccacaagggaaatacaccggaaacgattaaggcagccaaattaggaaaagaaaaaggagcggcagttattattctgacatggctggaggaatcagaaattatagaatttggagattttattatacattatacatttgatgcaagtcctgatcatcttgcaggggatattgattatgcaggagaaaagacgcagtgtgcattgcttgtggcagtggaattagttgcacagacggagggatatgctaattatgataaattctatgaagctttaggcatgattagcaatatcatcagaaaagcacgtacacatgtggctgccagagcagaggcgtttgcagaagagtatcagaatgattcagtgatttatacaatgggaagtggtgcagcatatggagctgcctatatggagagtatctgtatatttatggagatgcagtggcttgattcaagcagtattcataccggtgaatttttccatggtccatttgaagttacagatgcaaaccgtccatttatgattcaaatatcagaaggctcaacccgtgaattggatgagagagcacttacatttctgaaaacatatgcaaaacgtattgaggttcttgatgcgaaagagcttggcttatccacaattgatgcatcagtagtagattactttaaccatgctttgtttaataatgtatatccaatttacaaccatgcattggcagcaaagcgtgaacatccgttaacaacccgtcgctatatgtggaaggtagaatattaatgaaaaaattctgtgaaataaaatatgtattgtttgattttgatggagttatagcagatacagaagagagtaatggtaattatctgggtctggcattaaaggagtttggagtggaactgacacaaaaagacagggatagactaattggttcacatgcttccgatattctgctggaactgctggaacgctcgccggagaaaataacaatggaacagcttttgcaaaaaagaaaagaaataggaaatacatatgaaaatggcaacattaagccgatgaaggggttactggagtttattgccggcttgaaaaaacaggggaaaaagctggcagtggtttcttcaacctctacacggctgattgtagtagcattgaaccggatgaaaatgctgggtttgttcgatgtgctggtatgcggagatatgtgccggaatagaaaaccggatccggaatgttatagaaaagcaatgcaatatttagaagcaaagcctgaagaatgcattgcaatagaagactcgtttattggtatacaggcagcaaaggctgcaaacatagaggtagttgcgtatacaggagctggtgagaatcaggatgtaagtcaggcggattatgttatttcttcatacatttaattgtttgagtgaaagaaagagaaaacagaaggatgaaaagtatttaattgtatgcccgccagtgttcctggcgggttttgctatgtacaattaagttaatattaatgtacaaaaaacaaaacaaaaaattgtgcataatgttgaaaatgtatttctatattgacataaatgtatgaaatacatataatacaaatagatacaaaaaatagtgatacaaatagaaacaaactaatacattttggttttaaagtagtgcacatgctttggaataaataaaaaagaggaggtaggtgtccatgttttggattgaatttattgttttaatgctgatcattgtgtggggaaccagaaaaggtggaagtttcctagcaatggctggcggcatcggaatgttgattttcgtatatatctttagagtgactccatcagatccaccgattactgttatactgattatgttggcagtaattaccgcagcctgtacgatgcaggcgactggcggattagattttatggtacagcttgcagaaaaaatactacggaaaaatccgaaaaacattactttggtagcaccttttgtagcgtatttatttacattctgttgtggaaccggacatattgtatattcgttacttccggttattaatgaaatagcattggaaaatggaattcggcctgagcgcccgatttctgttagtattatttcatcccagcaggcaaataccggctcaccaataacagctgcaacagtagctattgtgggttatatgactatttttgaaaaagtaaatctggcaacaattatgctggtagcaattccagcagcattgataggagtattggttgcagcattgtctgtatacaagaaaggtctggaattagaggatgatcctgaatatcagcagagggttgcagatggactggtaaaagattttaaaaagaaagtagagggagaaaaacaggtaaccccaaaagcaaaaatttctgttgctatcttcctggtttctatggtagtaattgcaatatgcggtattttcccggtgctccgtccaacatttagcgatggtacacaattagcaatgacatctttaatccagattattatgtatgtagctgccgcaattattgtccttgtaagtaaaattgatagtaacgacattttagaagtaccgttgttaaagactggattctttgctgttattcttgcagcgggactttgctggctggtaaatacttttgttggtgcacagacaaacttcattacagaaaatttgtcagctttaacaaatgaacatccttggatttatattattgcagtatttctggtaggtgcactgacgagttcacaagcgtctacgacaatgattatgattccaattgcaattgcattgaatctgccggcttatattattgtaggtggatggatggcatgctcatccaactattttatcccggattccagccagtgtatagcaggtctggcttttgacacagcaggtactacaaagatcggaaaattcatatttaatcacagctatatgcggccggggcttgtatgtacaattgtatcggtattagtagcaacaggaatcggatattttgttttctaataaaaaccggtggtggcaaaacaaagaaaacagtaacagcacacagcctgcactattctgacaggctgtggaaactgccacttcatggattggttaccagatataaataaatatttataatggctatctgaaaaaatgaaagagcgaatctggaaaaataattgcttgttgcaaaaagaagaggtgagggagtccgcatgaaagaaaaattgaaagaaaggagaaaaaataaaaatgagacagcctagaataattgcaattggagatgcagtttgtgacaaatatctttccagggggaaaatgtatccaggaggtcagtgtattaacacatgtgcatatgcgcatatgaataatgcagaaagtgcatttttaggtaaatttggaaatgatgaagtagcagaatgcattcaggcagcactggaaaatatgaatgtagacttttcacatagcaggaattatgaaggtgaaaatggatttgcatgtgtgacactgaatcagggagatcgcgtatttgtcgggtccaatcatggaggtgtggcaaaagagtatccttatgattttacgcaggaagatttttcatatataagaaagtttgatctgatttatacaaatctgaatgcatatatagatgatgacatagaagaaattgcttctttgggtcttccagttgcatttgatttttcaaatcgatggacagacgaatatctgaaaaaaatatgtccgcatattaaagtggcaatgctttcctgtgcacatttaagtgataaagaacgcgaaagggaaatgagtaaagtaaaagagcttggagttccacttgttctgggaacaataggagaagctggctcatacattttataccatggtgaaatgatgtatgaaaaagctgtaaaggcagaaagcattatggatactatgggtgcaggagactcttatttcgcgacatttttgacatatattttacggcataaagaaccggaattttttaaagaagaaagtaaagatgacgggaatgttaaagaacttttaaagaaagccatgcaggctggagccgaatttgcttcaaagatttgtggtgtcgaaggagcgtttgggtatggaacaccaattgcaggaagaataattgataatagaaataattaaaaggtttaaggaggaacgctatatggatataaagccgacaagttacaggtatgacggagatggaatagaatgtgcatatcggaatgaaaaatgggttgtttgtatcaaaaattggaaaccgaataatgatattgatgggttagagcatttagagatacatcatacgacagatgaacaattcattttaatatctggaaaatgtattattattacagcggacagaatagatggaaagtttaatattgaattaactccggtggagaaaggaacattatacaatgtacctaaagagcgttggttttttactattgtagaaaaggataccaaaatgatgtatgtgcaggatgccggatgtagtatggataatagtgagtattgtaaactgagtcaggaagaaatttcatatattcagaaattagcaagaccaatgcttgcagaataatataacaacaatgtattaaaaatatttatgggaggattatcaatgaagccaacaggaatcaaaaatgtaattacagaaattttagaaagcagaaaagaagaaggcggtattaaagcattatattttgtgggatgtggtggttctaatggagcactttatccagcgaaaacatttatggaaagagaatgtgcaaatattaagtcggcactaattaatagtaatgaatttgtatatagtactccgaaggatttgggaaaaaatgtaatcgtgtgtttatcgtgccataagggaaatacaccggaaacaattaatgcagcgaagctggcaaaggaaaaaggtgcagccgtaattattctgacatggaaagaggaatcagagattaccccatttggtgattatattatcaattatacttttggggataataaggatattgctggtgaaaaaattatctgtgcacttctggtggcagtggaactgttgaatcagacagaagggtatgagcattatgaagaatttatggatggtgttggacgtattgatggtattgtgaaacatgcatgcaagcatgtggaaaaacgggctgaactgtttgccaaggaatataaagatgataaaattatttatactatggcaagcggagcgggttatggtgcagcatatatgcaaagtatatgcatttttatggaaatgcagtggattcattcttcaagtattcacagtggggaatttttccatggacctttcgaaattacagataaagaagtaccatttgtgcttcaggtttctgagggaaccaatcgaccgttggatgaacgtgcattgaagtttttgaagacttatgcaaaacggattgaagtaattgatgcaaaggatttagggctgtctacaattgatgcatcagtcgtagactattttaaccattccttattcacaaatgtatatccggtttataataaggctttggctgaggagagacagcatccactgacaacacgacgctatatgtggaaggtagagtattaaaaaacttaaaaaatgatgtaaacatacagcatgtcagattttgatggaaaatttgaagtacattacaaggaaagcctggaaatgataatgatttccgggctttctgagctttgacacatgacctgaggaagaaggaacagaattgaaaaaaacaataggtattattggtggcatgggaccgatggctacctgcgatttgatgaaaaagatttttgaagtgtcagatgcagactgcgatcagaactatgtgcatgtttgtgttgattgtaacacgaatattccggatagaacgaaagctattcttgaaaagggagaggatcctataccagagatggtaaaaagtgcagtaagtctgcaaaatatgggagcagatttattgatgataccttgtaacacagcacattttttttatgaccggttaaaaatatttactgatatcccgatattgcatatgccccgcgagacagtaaaagctttaaaagagcagaatatatcatgtgtagccgtattggctacggatggcgtgataaagagtggggtttatgagaaggagcttcgggcacagggaatcaaaacgatttatccggatgcagagcaacaacagaaaattatggaagtaatctatcagtgtattaaagctggaaaaaaggatgtagaaaagtatggacttgacgatattttgaaatccttgattaaacagggtgcgcaaagcgtgattctgggatgtactgaattaccaattgctttttccttggcaggaatcagagaaaatatagttgacccgacggagattgcagcaagagctgcattaaaatttctgcaattaccaatacatgcattataaagcagccgtatttttatgaaaataaatgataccggaaaaggactggatttctattaaaacctgtttcaggacttcattcaaactcccttcaaaaagtcgcaacaaacattgataatccgttggtttggggactatactattatataaattataaataccagacaggttattacagaaagagaaagggaggtatatgataacagggaattatcatatattttcagagcctttttgaatatttctgagggggaaacagatgattcaaaaatattataacagtattctggaacaggtttttgcacagattggaaagaaagaacacaacatgttctggcaaaatacagtaatgatttttcattaaagcagctggaaatatcagagcagataacaaataataaaaaggatcattttgcggcccacgaattccgggcagagaaattatcgggagcatatgagccgtttctggatttgattttggaacttttcgaccagcagaaggagatgacatttgatgaatttctggacaagtgtaatgtctattccctgcagcgtccggttattgcagcataccgggagaccggaaaatgtatccggaaagagagtttattgatacagaagttgactatgagcgggagcggatgcatgatgctattgcggcaatgctttttgaagtttctaagatacagccgtttatgctttggattaaccgtgtgcagtttgccggaaagggaaccatagaaatagtctatgaactgttaaaagcagagcatacagagaatatcggaatcgttctcggcatgaatgagaagcagcggctgccggaatatatgctgccgggctgggaaagtgtaacggaggaattggacaataatgttgcaatattccgcattggaaatgccggagaatcccgggaacaaagagatgaggttattacagcagaaagtattgaagatgatatcagaacattacagaatcttgttttttcatggattttgaacaggcattgttttatctggaaaagtagaccgcagaatcagatttgaaaattttacagtatcggatgaagtgaaatacgaactctggcagttctatgcatatgtatcggtatatatgagggatttgccaaaagcgctggaaataagtgagagtatcttacagcttgcagagaataaaaagaaccgcaggatgcgcttttatgcatagtatatccgctctgcaatttatatgtatcagtcaaaactgcaggaagccactgaatatgcaggtgttgcaaaaagtattgcaatagtaggtgacatggagcgcggtcagtttgaagcagagctggtagaaatataggcgaagatggcaggctggaataatattttcttctgtgcacagaacgtggaagtcagcgatgccatgattgaaaaattaatgaaatatgactaccggaatcatctggcgtacatttatgtgtatgcctatgacaataagccggagattgtagcaaaggcatattattccaaattccagcttatttattgcggtaagggaatcagattagcaacagaaattggtaatacacagcttatttacaatgcataccagaagaatattatgctgacctcttttctcgggaatcggttataccttaacggcattaagacagaatgaccttgcaaagcgttattttcagaaaacagtagaaattttatataatctggaattgccggaggatattgcggaagtatattacaatatggcaattaactgtattgcagcagaagaattcaaggaagccaacgaatatctgatgcgctgtatgaagagcattgaacgtctgcatttgaatagtctgagggtctgcaatttaagcaaattgtatggactcttagcattgtgcaatcagaagcttggcaaccgtttcaattatgagtctttagcgattttttgagtatttatttagtactttatcttaaaaccctttattttcaagggttctatcaattctagatgttaaatcccattatgttttattaaatactttattttgttagctgaaatattgaattttcaaggtgtgaatcccattttaggtatgggaagtcttagttataaatatattttccgaaatatatcccgtatgaatattatggattcagaggtcttttatgaaaaatatatttccgaggattttgaaacaaaatatgttccaaaaatatttaaggatgtatgccggcaatacctgatccgaaaaaaccgaatgggatgcatggatgagatttttgaaaaaataggaaagtattactatgatgatccggtggaaagaaaaaatggagagtttgacatcgtcacattagatgataaaggatatattttctatgaagcaaaattccggaaagaacctgtgacagagcagatgattgagaaagagattgtgcaggtaaaacagacgggattggaatgttataaatacggatttttctcaaaatccgggtttgcgtgcgaggaacgggaaaatcgcagtttaattgaattgaaggagctataccggtaaaaaacagaatacaatcggaaagaggcagttagttattggacgtcagaccggtgacagtccttgcatttgcgcaggtggacgagctgatttcttatataaaagaaaattctctttgaaagaacattcccgtggattcgtcattgtgaataaaaaacggcggattttttcgcatggaaattggaaaaagtgatctattttagtgaaaatactttctaaaaagtgtataatgattgaaaataaactgcaaggaggctatgctacagacatggacgaatatgcaaagtcgatcattccaatcattgaggcaaattatgaaaagtatacagagacagagcggtatatcgcagattactttttaaaacaggcgcggccggaacggctctcggcagaactagtgtcgaaagagctttccgtttccgtggcgtcgctgtcacgttttgcaaaaaaatgtggttttggcggttaccgggagttcacgtatgaatttcgtaattcctatgtggaaaaatctgctgtcgagcagcagcagtccagactggttttagatacctatcagaatcttttgaacaagatttacagtctgctggatgaaggacagattcaccggatcgtgacagaactgaaatgggcgagacgcgtttttgtctgcggacgtggcagttccggcttggcggcagaggaaatggcgacaagattccgctggatcggtatagacatgacagcacttcgggataatgagaatatgagaatgcagtctgtttttctaaaccggcatgacctgatgatcgggctgagcttgagcggtacaaaatcagagattttgtatatgctcgacagaggttttcggcagggggcaaggacaatgcttattacggggaaaaaccggcagacctatgaggatttttgcaatgaagtattgttggttccttctctgcagcatcttaatcatggaaatctgatctcaccgcagtttccactgcttttgatgattgatattttgtatgcagcctatgtgaatgacgaccgtatgcgtattgagaagatccagagagaagtacagcgcacattgcgcggaaatgaagacagataggagagattgaaaatgaaaattatcagaaccaaagactatcgtgacatgagcagaaaagctgcaaacattatttcagcacagatgatcttaaaagatgacagtgtacttggacttgcaacaggatctaccccgatcggaacttatgaccagttagtagactggtataaaaaaggagacttggatttctctaagatcacaacggtaaatctggatgaatacaaaggacttccaaaagaaaatgatcagagctactggtattttatgaacaaaaatttattctccagagtcaacatcagaccggattatcatttccttccggacggaacgaatcttgacagcgacaacgagtgcgagagatacgagaaactgattgattctcttggaggtattgatcttcagctgttaggactcggacgtaacggacatatcggtttcaatgagccatgcgattctttccctcaggatgttcatgttgttgacctgacagagagtaccatcgaagctaataaacgtttctttgcaagtgcagatgacgttccaaaacaggcttacacgatgggcgttggaactatccttcgcgcaaaagcaatcctgcttgtagtcagcggaaaagataaggcagcagcattaaatgcagtcgtaaacggaccgatcacaccacaggttcctggctctgttttaagacttcatccgaatgtaattattgttgcagatgaggatgctttatctgagatgaaataaaatgctataagagttttttacaagtcaggttttgaatgtaataaaaaagaaaaatcgtgcagaaacataatattttgtctgcacggtttttcttttatttgcgttttacaaaaactttgccaccatggcaacactggttttatcgcgggcgatttttgcaagctcgcggttgtcgagcagataacgcatgataagcgattcggcaacgaataactcgctgactttgaccgggatgctgccgccatccaatggtgtttccagggcgccacacaggaggacgacatctgcaagtgctgtgcctggtgcgtccggatagtgcgtgatcaggatgatcttcgcaccggtctttttggcaacggataaagtgtccatcatgtcgtgcgtggagccggagtaggaaacaaataaaatgacatcacttggacccatgaggcttgcggcaatcaattgcgtgtggctgtcaccacagttgcggaatttattggagatcgtggcgaagcgcacccagatgtcatttgccagaacccggctgccaccctggcccagacagtaaacggaggttgcgcgctgcaagagaagcgcagcctcgtcaattgcgtcaaagtcaagaacactcatagtgttactgatcgccgcctgaaaagaagcacatacattatcacataatgaagatgtcgacatggatggatctaaagaataggaagaaaacggtgtcggcgtcacatttgcctgcgcaagtgaaatcttcatttcattataaccttcaaatccgagctgtttacagaaacggtaaattgtggcttctgccatattgcaagctttggcaagtgaggaaatcgataaaaactgcgcttcctcggcatgctttgtcaggtaatctgcgatgatcgtacctgatttggtgagtgaatcctgcttttccgcaagcagatcccagaaattcttattaatcataatttaatcccctgtaaaatgaagcgagtgtcactgtttaccctgtgttttactgcgtaagcaagcgtttacagaaacacattaatatttactatataaaagtatatgccaaaatgaaatgtactgcaagataaaaacataaaaatgaaaaatattttcatgcaaaaacaaaagaaaaatggatgaatatgcggaattgtaggtataaaacatacacttagcactatttaaaagctaataaataaagatttatgtgcaaatgtgctatattttcaaaatgaaattagtacaaaacgtatatggacaaaatgaaaatatttttctaaaatatagttacttcgaaagagataatcttttaagaaaaggagaagaagaatatgaaaaagaaagttttggctaccttattggtgggaacaatggcagcaagcttattagcaggctgtggaacaacagttgagacaacaggaagcagtgacacaacaacagctcctgaaaaaactcagacaacagagaccgcagaagcaggagaggcaggcggttctgatgtttcggcagacattaccttatggacatatccaatcggtgaatggggcaatgcagagacagttgattccttaattcaggatttcaacaaggagtatccgggaatcaatgtgacagtggaatatcttgattacacaaacggtgatgatcaggtaaatacagcgatcgaaggtggacaggctccagaccttatcatggaaggaccggagcgtctggttgcaaactggggagcaaaaggattgatggttgacttatccgatatcctggacgacacagataaatctgaaatttatgaatctgtattatccgcatgtgtgaacaaagagggagctacttatgaatatccgctttgtatgacagcacattgtatggcgatcaacaaaacagtatttgaggaagctgacgctatgcagtatgtagacgctgagaaccatacatggacaacagatgatttcttcaaagcaatggacgctgtttatgctcacacaggacagaccgtaggtgctgtttactgtagtggtcagggtggtgaccagggaacaagagccctcatcaacaacctttacggtggaacattcacagacgcagatcacacaaaatatacagcagattccgctgagaacgtaaaagcaatccaggcacttgttgattccaaagcaatcggatttgatgcttctatcgcaggtggtgacgagatcaacttattccgtcagggtgttttaaatgtagcattctgctggaacattgcacagcagttaaacgctgacaacaacgatgcaggacttacaaacgatggcgatgagatccttttcatggcattcccatctgagaaagcaacagacacaaaactttgtggtggtatctggggatttggtgtatttgacaacggcgatgcaaacaagatcgaagcatctaaactcttcattaaatacatggcagacagtgcagaaggaacaccagacgcagttctttcttctacatacttcccggtacgtgatactgtagaaggcaaagatttaacaggtctttacggtgatgttcagacaatgagcgattacagcacattaatgcagtaccttggtgactactatcaggtaactccaggctgggcagaagctcgtacagcttggtggaatatgcttcagcaggttggaagcggtgctgatgtccagacagcagttgatgagttcgttggaacagcaaacgcagcagcaggtaactaagcagttcgtatagcaactaaataaatgataagtggatcccctcctcgcaggaataccggaggaggggatttttagccaaaaagttatggaaaggatggtgttttctttgaaatcagcagtaaaaccatcaaagcgcagccgtgtattggtaagaaaagaaacgaccgctgcatatctttttttacttcctagtttgattttctttctgggatttgtaatttttccaattgtattatgtgtgtggaccagtttttttgattcaacaatgaactctgcggatgtttttgttggacttgcaaactataaagaattatttcaggataaagttttccttggagcgttgaagaacactcttattatcgtagtggtttccgttccgatcacatgtgttttttccttatgggtatcttccgtgatcgtagatctgaaaggatgggcaacctccttattcagaattatattttatcttccggttgtaactggttccgtagcagttaccgttgtatggaagtggatgtttaacaattactatggaattttcaattaccttggtacaaagacagggatcatcgaccagaacatcaactggctgggtgatgagcgttatgcacttgcatgtatcatactgattttgcttacaacttccgttggccagccaatcgtactttatgtatctgcacttggtaatgtggatgcatccttggtggaagcggcaaatgtagatggagctacaagccttcaggctttctggaagatcaagtggccacagattatgccgaccacattatatattgttgttattacaacgatcaacagtttccagtgttttgcactgatccagctgctgacatccggtggaccaaaccacagtacagacacgatcatgtattacatctattattccgcatttaaactgtaccgttacggatacggcgatgcaatgggcgttgtccttgcaattatgattgcgatcctgtccgcaatccagtttaaacttggaaattcgaatgattaggaggagggttacagatatggaaaacaaaaatagtacaaaacatccttctgcatacaagatcatcagcattgttgtaattgtgatactggcaatattatttaccttcccattatattggattatcacaggttcctttaagacaaacgcagcgatcaactccacaacgccgatctggtggccaaaagagtggacgttggcaaactatcagaagttattcagccgccagaccgcaccgctgttccagttcaatattccattcagcagcctgatcacaggaagcagggatttgaaactgacactgacaggaccgacggtgccggctgcagtccgctggctgatcaataccgtatttatggcgatcatgtccatgatccttacctgtatcacagcatccatggcaggatatgcgcttgcaaagaagagatttgtgggacggcagttacttttcacactgatcgtatgtgcaatggcattaccaaaacaggttattttgatcccattacttcgtgagatgtcaagcctgaatttatataatacgatctgggcggttatcttcccaatcgtaggatggccgtttggtgtgttcttgatgaaacagttctcggagggtgtgccttctgaaatgctggaggcagcgcagatcgatggagcgagtgaggcaaagacatttttacagattgtagtaccgatgatcaaaccgggtatcggagcactggcgatttttacattcatcaacagctggaatgattacttcatgcagttgatcatgttatcaagcacaagcaacctgacgatctcccttggtattgccaagttgcaggctgaaaatgccacagatttcggtctgatcatggctggtgcggcactggcagccctgccgatcatcatcgtgttcctgttattccagaaatactttacaaaaggaattacaatgggagctgtaaagggctgacaaactatccttcttgtttaagaagggcggtataaaaaaataggacaaaaatcagacagaggagtgaagataaaatgaaagatattacaaaatatcagggagtcattccggcattttatgcatgctatgacgaaaaaggagaaatttcaacagaaggtgtcaaagcattgacacgccacctgatctcaaaaggagtaaagggtgtgtatgttggcggttcatcaggtgaatgtatttaccagcatgtggacgagcggaaaaaagtgctggaagcagtcatggaagaagcaaaaggaaaactgaccgtcattgcgcatgtaggatgcaataataccgcagacagcgtggagcttgcagcacatgcacagagcgttggagcagatgcgattgcttcgattccgccaatttatttccatttaccggagtatgcaatcgcagaatactggaatgcaatgagtgcagcagcgtcggatcttgattttgttatttacaatattccgcagcttgcaggaacagcattatccatgaacctgttaaaagaaatgctgaagaatccgaatgtgatcgcagtgaagaactcttccatgccgacacaggatatccagatgtttaaggcagaaggtgtcaaagagcgtggcgaaaatggatttgttgtattcaacggaccggacgaacagttcgtatccggacgtgcgatcggcgcagacggaggaatcggtggaacatatgcagttatgccggaattatttgtaaaaatggatcagcttatccgcgagaataatatcgcagaggcaatgaaaatccagtacaaagcagatgcgatcatctacaagatgtgcgaggcaaaaggaaatctttacgcagtcatgaaagagattttacacagaatgtatggcctgaagcttggaagcgtcagattgccgcttgcacctttagcaccggaagatgaggctgttgttgttgaggctcagaagatgatcgaggcagcgatcaaagaattataataagagaaatacatacagaaatatgccggggtgtacgcactgcttcggcttatttctgtatctgcagaaaaaatgatgcagctgccaatgtacggatttgaaattaagaataagcgttacaggacaatttcgggaggagatacaaaatggttacagacagcttacagaatctggaacagtatcgtggtttacataaaaacatggataccgtcattgattttttgaaaaaatgtgatctgactgcacttccagacggaaaaacggtgattgacggagaacgggtttttgttaatgtcatggaggcagaccttcgggaggcagaaggtgcggagtatgaatatcataaacgttatgcagatctgcagatcgatatcagtggaagtgaatactgggagtggacagacaaggcagaatttacagatacatttcaggaagcttcggactgcggacttgcggcaggcagaagcagatgtggcggaacgctgggggatggaagctttgctttattcctgccggaagaatttcacaaaccaagctgcaaaaacggatcacacacacatgtgagaaaagcagttattaaaattgagatgtaattgcaggaggaaaataaaatggataaacaggcattatttgatcagataaaaggtggattaattgtttcctgccaggcattggagcatgagcctttgtatacaaaagagggcggcgtcatgcctttgatggcaaaggctgcagcacagtccggagcagtcggaatccgtgcaaacacagtacgcgacatcacacagatcaaggaagcagtagaccttccggtcatcggtatcattaaaaaagactatgagggaacaccgatgtacatcacggttaccatgaaagaagtggatgagctggtggcatgcggtgcggatatccttgcagtacagggaacaagcgcattaagaccggatggaagcacagcggcacagtttattgaggcaatcaaggcaaagtacccggaacagcttgtgatggcagactgcgcaaccatcgaggaaggaatcgcatgtgccaatgccggagccgattttgtcggcacgaccatgcgtggatatacaccggagacacagggctgtgatgatatcgattttgatttcatccatgaactttccgaaaaatgcccggcaaagatcatcgcagagggacatatccactatccggagcaggcaaagaaggcactggaggcaggagcttttgcactggtagtcggcggtgcgatcacaagaccggctgagatcacggcaagatttgtggcagcgatcgaaaagtaaaaaaggagaaattatgagaattgtggctgtggatatcgggggaacaatgatcaagtccggtctctggaacggagagacattcgtggagttgcgtgagacagagacgcgcgcatcggaaggcggagcggcactgatggagcgtgtcaaaggactgatccattcctatcacgattttgaagcgatcgggatcagcactgccggggaagtgaatacggaagatggaagcattttttatgcgaacagcaatattccgggctacacaggcatgccggtaaagcagatcatggaagaggaattttgtgtgcctgccgcagtggagaatgacgtcaatgcggcggctcttggcgaactccgcatgggagcaggtgccggatgcgatgattttttatgtctgacctatggaacaggtgtcggcggaagcattgtgatgaacggaaacgtttacccgggggcttctttttctgccggaagctttggcggaatggtgatccacccggaagaaaaggtgggaacggacagtctggagggctgctatgagcggtgcgcttccacgaccggattggtcagacgtgtaaaaaaagtcgatggcgctctggataatggcaaaaaaatattttcggcaaaggacagaccggagatcaaagagcagattgatgcgtggatcgacgatatctgcacaggtcttgtaacgctatgctgtattttcaatccatccaggatcattcttggaggaggcatcatggcgcaggagtatgtgctttcggaggtaaaccggaaggtgaaagcgcagatcgcaccgggacttagaatcgtggagatcgttcctgcaaagcttgcaaacacggcgggcatgatgggagcggtcagccttgcggaaaagttacttgcgcagtaagatgatcgtgtacaatatatctgtttggaaaaagattttttagatgacagcacagggaggatgagacaatggatcagaaaaatatattatgttttggagattccaacactcatggatataattccaaaaccggaggacgtttcacagtagaggaacgctggacaaaacttttacagagaaatctgggtgatgactactatgtgatcgaggaaggattaagtggacggaccacatcttttgaggatccggtttttgagggactgaatggattgaatgcaatttatccgtgtatgatgacacatgagccgttagatctggtcatcatcatgcttggcaccaatgatacaaaagaccggtttaatgcaaatggatttatcatcggaaaaggtctggagcgcctgacacagaaagcgatcgacacgcatgctgcatggcgtaataaaccgaatattcttctggtagctccgccaccaatccacccggattatgcaaaaacagctgttgcaggagagatgggtgacaaatgcgtggagcgttccagagcacttgccaaagaatttaaggatgttgcagaacggttaggatgtcattttatagatgccggttccataccgggcattgagatgtatccttatgactggatgcacttaagccttgacagccacaggatttttgcagagtatctggcagagtatctgccgaagattgtgtgatagatgttctattttggataataaccggatcatcaggacaaaatatataattgaaagaatagaaatggtttcatgagaattttcatgaaaccattttgtcttgcgtacagaacaataatttgacaatattgtcttatacacagaacaataatatatcgatattgtcttatacacagaacagaaatatatcaatattgtcttgcgcacagaacaaaaatatattaatattgtcttatacacagaacgaaataatggtaaaattgtcttacagacagaaaggagtgccgtatgaacagagattatttaaagcagattatgattgaccaaaaggaaacttatttaaataatccaatgataaagagagactatccattggaagataatgtaaattattgctttgttggaattagaagaactggaaaatcctatatgatgtatcagcagattaagcatttgcaggaaaatggaattcctctcaaacagattgtttatgtaaattttgaagatgaaagacttttggaactgtcagcagacgatctgaacctgatcctggaaatcggactcgaaatgtctggtgctgacaataaaccatatctttttttggatgagattcaaaacgtggaaggctgggagaagtttgtccgccggatagcagacatgaaatatagaattcatattactggaagcaacagcaagatgctaagcagtgaaattgcatctacacttggcggtagatttatgatagtagatatatatccatattcgttcccggaatatctggctgcacaggggaaggaaaaaaattatctggaagtgctcagtacaaaagacagggcagaagtagttggaatgtgtgatcagtatgtaaaatacggtgcttttccggaattggtcgatatcagaaacaagcgggaatatttaaatagcatttatcagaccatttatctgggagatattataaccagaaataaaataactaatgattttgcagtaagattgattttgaagaagattgcggaatcagttacaaaaccattgtcctttaacaggctgagcaacatcttaaagagtgcaggagcagtactcggaaagcagacagtgattaattatgtcggttatatgatggactcttatatgttgttcacatcgcaaaattatgcggcaaagctggtggaaaaagagacttcgccaaaatattattttatggataccggcttgttagggcttatgcttatggattgcagttcagcgcagttggaaaacctggtcgcaatagaactgattcgacgttatggacgggaaaatgtattttattttgaaaaaaacgttgaaattgatttttatgttccagaagaaaaacttgcaattcaggtaagcctgcaggtcttagaccaaatagatacaagggaacgggaaatcggagcatttgtaaaattaaaaaactttattggtgatgcaacctgcttactgattacaaatagtgaagaggaagaacttgactatgaaggagttcacgtaagcgttgttccggtctggaagtggctattgcagaatagaaaacaggatatataaaattatgtaaaaaataaaacggcagatgtattggaattacatctgtcgttttatcatgagcttacaataacctgtaaataataattgcaatcacaatccccagaataccggctactgtgatatcaaccgtaaatccgaatgtcagaaccaaaatccccagatccaacaccattggattgacaaatccaaaactctggccgtaactaagccagcttaaagcaggaacgcccgcacataactttccgataagaccgcctaacacaacaccgacaaggatcagaaggactaatgcccagttattttttcctaatacacctctgctcatattccatttctcctgagttcattattttaagtaatcactgatacgtaaaataccatccatattataaaatagattctgaaattaagatatatttttttgcaaatttatttatgtccctgtctgtagcggatgaatgataacaccgcaaaaagcaggatcacgccggctgccatcgtgaggaatacgttctttgtgaatccggcaaccagataggcggccacgcagcagccgccgaccgtaagagcgtaaggaagctgtgtggatacatggtctacatggtggcattgtgcaccggcggaggccatgatcgttgtgtcggagatcggtgacatgtgatctccgcagacagaaccggcaagggaagctgcaatgcagacaacgagcatcggatctgtttccgggaacatagcggtaacgatcggaattaaaatgccaaacgttccccaggaagtaccggttgcaaaagcaagtccgcttccaaccagaaataatatagccgggaaaagtgaggttgcagtcatattgccggagagcatgctgctcacaaaggtgccggcttctaattttgtactgcagaaaccgcctaacgtccaggccagaacaaggatcaggatcgcagaaaccatcatcttaaatccctgcggaatacactcggcaaattcactgaatgtgatcacgcggcgtggcaggtataacaaaaacacaaacactaatgtaatgaaggaacccatcacaagccccatggatgcatcgcagtttgcaaaagcgttgatgaagctctcgccctcaaagaatccacctgtataaatcatgcagataatgcagctcacaatcaggaaaatgaccggaagaacaaggtcgatcacctttccttttgcggaaataatattttcttttacattttcataatcatttttgccggagaaaagatcaccctttgcagcattttcttcaaactttttcatcggaccataatcaagtccggtcacacccatgaagatcaccatcagaatggtaagccatgcatacaggttaaatgggatcgtctgcaaaaacagagagaaaccatctccgtttgtgtatccggtgactgcggcagcccagcttgagatcggtgcgataatacagatcggagctgcggttgcgtcaatgatataagccagttttgcacgggaaatcttctgcttgtcggtgacaggacgcatgacatttccaacggtcagacagttgaaataatcgtcgacaaagatcacgacaccgagcgcaaatgtggaaagcagagcaccggatctggtcttgatcttattgcctgcccattttccgtaagcggcagagccgccggctcttgtcatcaatgcaacaataatgccaagaaatacgaggaaaatcagaataccgacgttccacgaatcccccagcttttccatcataacttcaaaaattgcctcaatcgttccaaccggactgaaatttgtatataaaagagctccggttacgacaccaataaataacgacatataaacttcctttgtgatcagcgcaagcacaatggcgatcaccggcggaagcagcgcccagacagtaccaacaaaatccataattcctccttgttttgcgaagcaaaatgcgactgccgttgcaggagcagaggaattttgcctccttgttttgcattttttgttttgcgaagcaaaaactccgaagcgttgccccggagccagtattctgtaataagtatatatgattttgtgtgaaaaggaaacaaaaatttgctttaattgataaaaaatacaaaagtttagtaaaaatatacaaaatgaaggtctgcaattctacagatcatcagactgtccgcaaggtatcggatagacagatgtcattccggtagaaatcagtttgctgataagacttgccatctcatccggcgtctcctttttgccatgagccagccatgactcgatcagaccggaacagccggaaacgagaaaattgctgaaatattcataagttggcagaaaatcagctgaatgatgcgcaaccatccattcgtgtatgtattggtgttcaaacaatttcttgatcttgacagaaaaagaaatatcgccgttgggactcagtagtgcgcagcacagatcggagttttggtcaataatctgaaaaatttcgacaaagagcggataaggaaaatccggagtatgatccgggtgataatttttgaagacctgctcaaactgttctaaaagctcctgctcggtctgctccaacatatcataaatatctttgtagtgcaggtaaaaagtgccgcggttgatgtcaacagactcgcacaattcttttacggtgatatccttgatactttttttcagcataagggaggtgagtgcgtgtacaagcagatagcgggtacgcttgatacggcggtcggtttttgtttccatatataatgtgagatcctttcatataaaatgtgatgttatcgtctggtatggttttttctggagttatgattaaaaatttataatcctaaaaattttctgaaataatcaacacagtgtacataatatgtcaattaacaaacagttttgaaaaatatgtttattgagtaaaccagatgcccttattataataatgcagtataaaataatcaacacaatgttaagtatagtgaaatgaatcagcggtaaaacaactgctgttttgcagcgtaagaaaaatgattcagatataacatgaaagaggatgaatatggaagaaaaacaagaaaaagaaaaagggaatttctggcttaccgtcgcttcctttattgtaaataagcggaaagcaatcgaaattctgtttgttttggcaatcatttacagtgttctttctattaataaggtgcaggtcaatcaggatatcacatcctatctaccggcagacagtgagacgaggatcgggctgtcactgatggaggagcagttcacaacttatggcagtgccaaagtcatggtctcgaatatcacctatgcgcaggcggaaactctggttgacgatctggaagggattgagggtgtgaagcagattgaatttgatgattccaaagatcatttcacaggtgcggatgcgctgtttagtgtgacgtttgacggaacagaggatgaacagatcagcaaagatgcgcttgaggaagtaaaagagacactggatggttatgatgtctatgtttcgtcctctgtcggtgaggaggagcgcagtgcagagtctctttcgcaggatatgaatattattcttgtgctggcggttgtcatcattgttgcggtgttgatgctctccacaaaagcatatctgcagatcccggtattactgatcacatttggcgtggcagcagttttaaacatgggtacaaactactggtttggaacgatctcatctgtcacaaattccattgccgttgtgcttcagctggcactggcaatcgactatgccattattttgtgtgaccgtttcatggaagaacatgagacgctggatgcagaggaagcggtgaaagtggcactctccaaggcaatcccggagatcagctcgtcctcccttactacgatttccggcatggttgcgatgatgtttatgcagttccggctgggctacgatatgggtatcattctggtaaaagcaatcatactcagcctgatttccgttttcttcctaatgccgggcgtgcttttgatttttgcaaaaggaattgataaaacccatcacaaatgctatgtaccaaaaattacgtttgtaggtaaatttgcaaatctgaccaaatacatcattccgccggtttttatcgtgtttctggtatttgcattttgggaatccaatcactgccagtatatatatgacacgaattccattgtaagcgcgaaaaagagtgaatcgaaaattgcaagtgaaaaaattgagaatacctttggtgccagcaatcagttggttgtcatggttccaaaaggggattatgattccgagaaaaaggtattgggaaaaattgaaaaactggattatgtaaactcggcattgggacttgcaaatgtggcgatcaatgatgattatatgctgacggataagctgaacccaagacagtttgcagagttgacggatctggatgtagaagttgtacagattttgtatacagcatatgcatacaatgaggagcagtatggtccggtatttaccggcattgatgattatgaggtgccgatcattgatatgttcctgttcctgtatgaccagtatcaggaaggatatgtgacattagatgcagatcttgacgatcagcttacgtccttatatgacacgctgcatgatgcgcaattacagctgcagggagatgactattccagatttgtattagatctgtcacttccggcggaaggacaggaaacctacgatgcgatggatgagatccggggtattgcagcgaaatattttggaaaagacaatgtcattctggtaggaaactccacgagtgaccatgatctggaatcttcctttgcatcggataatatcgtgatcagcgtattgacggcactatttgttatgatcatcctgtttttcacgttccagtcagcagggcttccggtgcttctggtactcactatacagggaagtatctggatcaactttgcagttccggcaatgagaggacagacaatattctttattgcgtacctgatcgtgtctgcaattcagatgggtgcaacgatcgactatgcaatcgttatttccagcagatacatggatctgaaacagagaatgccgatcaaagatgcgattactgaatccttaaatcaggcatttccaactatttttacttccggaacgattttgacctgtgcaggatttttgatcggtgagattgcatccgatccgacggttgcctccattggtgtggctttgggacgcggtacgttaatatccattattctggttctttttgtgctgccgcagatcctgctgtttggtgattttatcattgagaagacagcccttgccatgaatatttcacgacctcagaaggaggttgtcggcagagtgagggtgaccggacatgtaaaaggttatgtacagggagagattgatgcagatgtttccggtgtattccagggacagatgacagtgtcgttagattcgcacataccgggcagacatggagaagtcacacaggacgatacacaaaatccaatgctgccgggaatgacgcaggatgaaaatgtggctgcagaatcagagacagccgcaaaggaagagcaggaggagaaaaagtcatgaaaaagatgagaatgaaagtacttgccctgtgtttttccatgacactgaccgtttctgctctggcaggaaacggacggttggccatacaggctgccacctcacaggaaagcagtggtacaaaagaaactacagaaaaagacagcacaaccagtgcggatacggcagaaaataaaaatcagatcatcgaaattgccgatgaaaaggcatttgaagaatttttacagaactgtcagtatgacagctggagtgttggaaaaacggtaaaacttacccataatattgatctctcgaaggttgatttcaatggtgttgcatatttctctggggattttgagggcggcggtcacacgatcagtaatgtgaagctgcaggtaaaaggctcggatcacggatttttccgttatctgggtaaaagcgcagttgtgaatgatctgaagatctccggtaagatcacttcagagggaagctgtaaaaatattggcggaattgccggtgtgaactatggtacgatcgggaactgttcctttgaaggaactgtcaatggaaaaacagcagtcggagcgatcgcagggatcaacaaaccgaccggaaaaattgtaaactgcaggagcaatgcaacagtgacagccaccaatcagaccggaggaatcgttggaaataacgaaggacttgtgtcagagtgtacatcggagtgcagcatcaatacagatgagctgaaaaccacgatggatattggaggcgttgacattggtacattaaatctcacagggcgtgtaatagacaggaatgatatgggcggaattgtgggtgtttcgactggaattgtcagtgaatgcatcaatcagggaaaaatcggttttgcacacacgggttataacgtgggtggaattgccggacgccagagtggaaaagtcatcgactgccacaatgaaggggaaatctacggacgaaaagatgtaggaggaattgtcggtcaggcggagccgtatatagaatcggagtatctggatgataaggtaaatcaggtgcaggattcggtcagttccatcaacacgaccttaagcaacattgcttcgaccatgagtgatacctccacagcagcaaagacctatgtggacaatctgtcggagcagtacgataattcttcgaaaactttgtcggaatctctgggttccctctcagattccatcggggaatcaagcccggaagcgcagcagtacatgaatgatattcataattctctggataaaatagatagtatccagggaaacaatcatattttaaacaaagaacaggcagaggcggttacaaaagaatggcagaatatcaacagtaatctgtccaacattcgtggaacaatatccgattccaataaaacggcagaagattttgtggatgatatttccaatcagataaaagaaaaagatacgaacggcgatattgataagctgacgaacacagtggatgatggaatccagtctgtcacaaatgatgtgcagaagatcagtaagcagatcaaaagcattcagaatacggttggagatacgctttctgtggtgacaggcgatgaggagtatatggaagatatctcgtccgcagccagcgcaaaagatacagatggtgttgtttcaggaagtgtaaaccgcggaatggtcaatggcgatctcaatgtgggtggaattgtcggaacgatgaacattgaatatgatctcgatccggagttcgatcctgatcttacagattctacggacattacactccgttctaccgtgaataatgttgtcatccgctgtagcaactatggggaagtgacttcaaagaaaaacagtgtcggtggtattaccggattagaagaacttggactggtctatggaagtgaaagttatggctctgtgaaatctgatactggggattatgccggaggtattgcaggaaacagtgtcagtgcaatctccaacagttacagtctctgtaatgtaaatgcaaaggattatgtcggaggcattgtcggaagcggatataccgtgaaaaactgtgtttctgcatctacgatcacaagtgatggggaaggtctgggaagcatcgcaggaactgtgtctgaagagggcgaggtaaaaggtaacatttttgtgggcgatgaccttgatggaattgacaacatcaactatgctgggattgcagatgaaaaaagttatgaagaggtcatgaaacttgagaatattccggaaggattccataaagtgaagataactttccgggcagaagataatgtggatattgtaaagacaatcgcatataatggaagcttcagtgaatctgatcttccacagattccggaaaaagatggttactatgcagtctggccggaggatctggttggaaaaccaatgacggaaaataaaacggtggaggcagagtacagccgttggacagagagtatcgtgggaacggaagtgataaacgacgcaaaaacagaagatacagctagtgaaagttccgatacagaaaatgaaaaagcagttttccttctggaagggaaattctatgatgacacttccatccagatggcagagtgtgacacagatctgccggacggagatgtcgtgtatgcttacaactggagtcttgaatacctgcatgacaaaatatatgatacagtaaaagcacatttttatgtgccggacacttcaggaaaaaatgagatctggtacagagaaacaggcagcgatgcatggacattggcagaaaccacagaggatggcagttaccttgtggcagacattccatatggggcggcgtttgcactggtacatgcggcggcagatcacaccttgtactatgccggcggcggtgcagcggttgtattgcttttgatcgtactgatcataagaaaacgccggaagcgtgcacagaaaaaataaaatgatttgatgggatgcgcattgaaacatttacatagaaatgctatagttagtgcattcttttatgacagagaggcagctatgatatttgagacacatgcacattatgatgatgaaagttttaacgatgaccgtgaagcattgatccgttccctgccggaaaaagggatcggcaggatcatcaatgtcggggcttcgatagagacaacaaagacaactctggaacttgctgcaaaatatgactacatttatgcagcggtgggcgtacatccaagtgacatcagcgggttgaatgaagagacatttgcctggttaaaagagcaggcatctctttcaaagaccgttgcgatcggtgagatcggactggattattactgggataaagagccagaggtgcagaacgcacagcgttactggttcagacggcagatggaacttgccagggaaaccaaccttccggtgatcatccattccagagatgcagcagccgatactatggaagtgatgaaagcggttcacgcagaggagataccgggtgtcatccattgctattcctactccagagagatggcacaggaatttatcaaaatgggttactacatcggtgtcggtggcgttgtcaccttcaaaaacgcaaaaaaactcaaggacactgtagaggcaatcccattggatcgtatcctgcttgagacagactgcccgtatatggcaccggagccacaccgtggcacacgcaatgactcgtccaacattccttttgtcattgcaaaaattgcagaattaaaaggaatcccggcagaggaagtagagcgcgtgacagaggagaatgcgagaagattattcacgaaagtaaaatagtaaaaacttaacgcagttccaccgcatctttccagaaacgttttggaatattctgcgcctgcagttcgggattggtacgcgcctcgatcgcaatgctttcgaaaaaggtgagccacagcttctggaacttttcttcatttttagaataattcgaaagaagatctgtgttgatcccagaggcatccacaagcatataattctttccggcgcggtgcacagcggcaaggttgtgcacttcgtcgtaaatcataaaattttcctgcggaaaacgatccgtaaaatgctctgctaaaattggcaggacattattttttggatgaattgtcgaaaaaaggacaccatttttcaattccgagaaacgaagaaatccttttaggtgatgagcctctgaggcggtagctctggataattcaaacacccggtaaatataaggattgctcagggaatctaatacacctgcgccttttggggaatggagcgcggcaacaatcgtctgatatacagcggtcgctttgtccatcttcttcttgccggaaagatcaatggataaaatagcagtaaggattgtctcgtaaaaatcgtgtccaagcttccggtttagcgtagaaacaacttttctggctttttcagcggatggtgcgacggtgtggtagtcgcaaaacagctcgtaattatccggctggccggataccagataaatatcagcgtgagagcatctttcctgaatctttaattcccaggcatcgtatacgccggtcaatattccgtttggtgtgttttcacagataaatacatgcataatgtcctgctcctgtcttgaggaaaatattcagggaaataaaagttttacatttatctacgatagcggaagcggctccgtggataagccggtatcgaacaggctcaattgttgataaccgctctcacggatctcacgtggtatctgtgtcttatcacccatcagattgcggcagatataatcttcttccagcttcgtgcggtacatcatcctgccggagcaggtaataaaataaagagcgcgtttcaacacaacacctatcttcttgagatcggcaaaatcgagggtgctgtgacgtcttgcttttacaatgcggctggcagacttatagccaatacccgggacacggagcagcgtatcatagtctgcacggttgatctcgaccggaaaatattccagatgccggatcgcccagtcacacttggggtcgagaaaaatgttaaagtccggccgctccggacttaaaagctcgtcggctttaaatttataatagcggagcagccagtctgcctgatacagacgatgttcccgcaggagcggcggaccgccgggcagtgcaggaagattgctgttgtgggtgacattcacaaaggcagaatagaacactctctttaaatcaaatttctgatacagattctcggcaatgctcacaatctggtaatcgttctcctgggttgcgccgatgatcatctgtgtgctctgtcctgctggcacaaactttggagcatgacgataaagggcaacttcatttttattctctgtaattccgttctgaaccatacgcattggctttaaaatcgtgtttcttgatttgcagggcgccagctttttgagactgtcggcagtgggcagctccagattaatgctcatgcggtcagccagaaatccggttttttcaatcagaacaggatcagcaccggggatcgcttttacatggatgtaaccgttaaaatggtgcactgtgcgcaatttataaagggtctggtataaaagttccatcgtatagttggggcttaccataatgccggaacttaaaaaaagaccttcaatataattccgccggtaaaattctatcgtcagttcgcagacttcctctggggtaaaggcagcccgccggacatcagagttacaattattctggcagtaagaacagttaaaaatacattcgtttgtaaataaaatcttgagaagggaaacacaccgtccatctgcggaaaaagtatgacagatcccactggaaatagagttgccaaggccgataccatcaccactgcggtccacaccgcttgacgtgcaggcgacatcgtattttgcagcgtctgagagaatcgtaagtttttccatcagtgacatattttgctggattttcatctggatgtgatctcctccaatcaaaaaaataaaatagaacatacgttcgataaaatgagaataccacatccggaaaaagaatgcaagagaaaaagactgccaatttctggacagtcttttcaaaagttgccggttatatggttggcagtcttaattatttgtgaaataatcagggtacattgccagcagttcttctttctccgataaatgccgggttaaatgccgtgtcataagcatttcagccatttcactatcatgtcgtctgatcgcatacaaaatatcttcgtggtcttttaatacataatcgtgttgctttgattttgtggaaagggagcggagacggtcaaagtgaaccatctgttccttgataatatggtaagaccacattttatctgcagcgcggaacagcagctcatgaaattcattgtctaattccagaaaagtctcgcgatcctgctgttcaaggctgcgttgctgtttttttatattataatcaagggcatccatgtctgtatctgcaatcttgtcgcatagaagtcttaaaatagcattttcggttacaagccgtaaaaaacgcgattcttctacaatattgtaatcaattttggaaatatagctgccacgctgtggaaggatttcaaccagtccgatgcggtttaattcaattaaagcttcgcggacaggtgtccttgacaaggacagtgtggtggaaagctcattttcactgacagcggttccgggctgcaactccagatgaatgatgttatataagagtactctgacagcataggatctggaattttcagagtgttccttttgaagaatgaccatttttttccctcatttcattataatatactagtatactattaaataaaaacttttgccagattatttttaaaaatcaaaagttaaaacaattttgcggatggaaggatctctgctgtcaacaaaatcaaaagcttcctgcgcttttgtaagcggaaatgtatgcgaaatagaattgttcaggtcaagagtaccttctttgatcatatcaattgcttttccgaacattttattttggaggcgggaacctctcacatccagctctttggaagtgatcaggaactggtttacttcggtcggagcggtggaaaatcccatagtaataacacgtccggcattaccggtagcctgaagcagtaataagagggaatttttcacgcatgcggcatcgatagagacggtggcgcctctgccgtgtgtgtattctaacaccttcgcctgaaaatcttcagttgcggcattgatcgtaaactgtgcgccgtgttctctggcttctgcgagtttgtcatccataatatctgctacaatgatatggtcgcagattgtatgtgcaatttttaaaattgagcttccaagtgcgccagcaccataaataagaagcatgtcgtctttttcaagttcagcacgggtgcaggactgaatggcgattgtagtaggctcgatcataacggcatcctgatcggagagtgaatctggaagaagatagcagtcagattcaggaacagcgatatattcgcggtagccaccatctatatgtacgcctcttaccttgaggttgtcacatacattgccacggtttttggagcatggatagcagtgaccacagcttgtaacctggttgatgataacacggtctcctatttttaaagaagaaacagtatctccaacctctgcaacgacaccaaccatttcgtgtccgataatacgcggataagtagctgcagcattggtgccatgataaattccaacatcagatccacagattcctgcagcagtcatttttactaatacgttatttttagaatcaatgacaggtttttcaatgtcaattacttctaattgattcggttttacaatttgtacggctttcataatagtctccttatcttaatttgaaatagatgattgattatttaggaatgccaaaaaacaacttacatactagtattctacataaaagaaaaaagaagtcaataaaaaatgaaaaaacaaagcaatattatgcaatatgcataaaaaacagggtgataatatgttaaaatatacatattgaaaaaaataaacaaatgaactaccatactagcatacaaacaaaacgccagaaacaacttacaaacatttcatttaggaggaaagtgattatgggacttgcaaaggcgattaaaagaggcgcaagtgcattactgatcggttcaatgatgacaggacttttaacaggctgctcagcgaccggtgaaaacagtggaggtaaattagtaaaaattgcggtctgtgtatcagatcagacaccagccgcacaggcattggcagatgtgttcaaaccgatggtggaacaggcgaccgatggacgttatgatatccagatttataattccggtgtacttggaagcgaaaaggtaacatatgactatacgaaaagtggaatcgtggaaatgtgcgtagtcggaacaaccatgtggtctgaaacaccgaaaatgtctatcccggatttcccattcctgtttgacggcgtagagcatgcaagggtttgttatcagggagagcttggagaatatattgcagaagaccttgagggcacacagccattgaagctgctttcatggtatccaaacggggccagagtgtttacatccaataagaagctggaaagccttgatgatttcaatggacagaagcttaggatgcctaataacccaattcatgtaaaacttgccgaaagtcttggagccaacgttgttattatggatatgggagaagtgtttacggcattagagcagggagtggcagatggacaggacaatccgcttgccacggtaaagacagaaggctggtatgaagttcaggattatgtttatgagacaaaccatatcatttcatcgttggagctgtttgcaggggatgagttctggaacagtctgagtacagacgatcagaaagcatttgaagaggcttcacaggcagcatcagattatgcatgggatttgtatgaggagcagctttcagatgacaagcagtttatgaaagataacggactggtcgttacagaactctccgatgaggacagagaagcgatgaaagagaaaatacagccggtttatgattatctgaatgcacagtatgactgggtagatgatgtcagaaaaatggtagatgacattaaagtagagtaaggagaaacggactatgaacaaattagcagataagctatttaaaggtattgactattttacaggtattcttaccggcttaatggtgttctttgtatttttgaatgttgtacttcgaaccttttttaatgccggtctgacatggtcagaagaactggcaagatacctttttgtatacgttacctatatcggagcaatcagtgcaatgcgtgccaatgcacatcttggcgtggatacactcatcagcagaatgaagccacaggttcagatggtaatgtatattgtatcccagacaattattgcaatcttaatgattattttagtgtggggttctgaaaaaatggtggcacagaataccgcctcaagaacagcagcactcggaattccatattctgtattatattttgccggaatcatcacaggcgtggcaattgcgatcatggcggtgataaacatcgtccatgcgctgaaaaatccatctgaaatatcagagattgttacgatgagcacttcggatgatgatgagatcgctgcagaggcaaaagatggtgcagagaatctttcggatgaagaatatgcaagaagactgagagaagagggaggaaaataacatgacattagtaatatttttagctgccctgatcggtggtatgctgattggacttccaatctgcttcgcacttttattcagtggtgtttgtatgatgttatatctgaatggctttaatgcccagattttatcgcagaatttattttctggtgcagattccttttccatgatggcagttccgttttttatcatggcaggtgaatttatgaaccgcggcggtattacaaagcgtattgtaaatgcagcgaatgcgattatcggacatgtccgcggcggactaggctatgttgcgatcatagcaattctcttatttgcaagtatgatcggatcagccgttgcttccactgcattccttggagcaatcctcattcctatgatggcacgtgccggttataagcgtgatacctgtaccggactgatcgcagcaggaaatattttatcgccgatcatgccgccgtctgtaccaatgattatctttggcgtgcaggcaggtgtttccgttacaaaattatttatgggcggtattgcaccggctgtatatttatcaggtgctttgtgtgtattatggttctttatcgcgaaaaaagacaatctcgcaaaagcggagagacagtctgcaaaacaggttgcaaaagcattgcttgacggactttgggcattgattcttccggtgtttattcttgttggactgcgcagtggtaaatttacaccgacagaggctggagttatcgcagcggtatatgcattagtgattggactttttgtatacaaagaattaaaaatcagtatgctgatggactgtctggtttcagcagcaaagtcttcatcggtgatcatgtttcttgcagcggcagccatggtgtcgtcctggatgatgacagttgcaaatgttccatctatcgtcacaggtattctggcaccgtttatcgagcatccaacggcattaatgttaattatctgtctgatcgtgcttttggttggaacctccatggatgtaacgcctaccattatgatcctgacacctgtattactgccggcagtgaaagcagccggaatcgatgttgcatattttggagtggtatttattttaatgacggttttaggtttacttacaccaccggtaggaacagtattaaatgttgcctgcggcgcaggaaaaatcaacatggagagaatggtaaaatcgatatggccgttccttctggctgaggtagtgatattactgcttatggttttattcccatctcttgtgacggctccgatgaactttttcctcggataaatcagtgattgcggagttttgattcaggttaaaacttcgcagttgtctttgaatataacaaatagaaatggagatcagaaaaatggaaatgacaatgagatggttcggaaaagattatgataccgtaaccttggaacagataaaacagacacgctatgcaaccggaatcattactacattgtataataaaatgccgggagaagtgtggaatctggatgaaattcttgcaatgaaaaaagaggttgaggacgcaggtcttcatctggcaggaattgagagtgtcaatgtcagcgatgcaatcaagacaggcggagagggcagagaccatgatattcaggcatatattgagacattggaaaatctcggaaaagcagatatccatatggtctgctacaacttcatgccggtatttgactggacgagaacagaacttgaccgtgtgagagaagatggctctacggtaatggcatataatcaggatgcaattgataaaatggacccggagaaaatgtttgatgcgatcaaagatgacatgaatggaaccgtcatgccgggctgggagccggagcggatggcaaaaatcaaggatttatttgcattatataaagggattgatgaggatcagctttttgaaaatctgaaatattttctggaagcgatcatgccggtctgtgacaaatatgatataaacatggcaattcacccggatgatccgggctggagtgtgttcggcctgccgagaatcatttcatcacaggaaaaattaaaacgaatgatggatatggtgccaaataaacataacggtgtgacattctgcatgggctcgtatggaacaaacttaaataacgacctgatcgcaaccattcatatgttaaaaggcagaatccattttgcacatatcagaaacctgagatttaacgacggaatgagagactttgaggagagcgcacatctcagcgaggatggcacatttgatatgtatgctgttatcaaagcactttatgaagatggatttgatggaccgatccgtccggatcacggaagaatgatctggggagaaaaagcaatgccggggtatggactttatgaccgtgcattaggcgcagcatatcttcgcggactgtgggaagctgcaaaaaaggaaggagagcagagatgaaactgacattacagggtttgcaggaaaaagaacagtggaaaaacgcaggaatcggacttccttcttatgatatcgaaaaagtggcagaagagacaaagaaaaacccggtgtgggtgcattttggagccggaaatattttccgtatttttatcggagggatcgcagatacactgatctcttccggagagatgaaaaaagggattacctgtgtggaaacgtttgatttcgatgtggtagataaaatatacagaccgtatgataacctcgttttagctgtgacattaaaagccgacggctcaacggataaaaaggtgctaggttctctggcagaggcaatcaaagcgcagtcagaagtgccggaggagtgggatcggttaaaagaaatcttttccgataaaaatctccagatgatctcatttaccatcacggagaaaggatatgcgttgaagggagtggatggaaattattttccatttattcagaaagatattgacaatggacctgaaaaaccggtgtctgcaatggctgttgtctgtgcattgctgtacgagcgttttcaggcaggaaaggcacctcttgcagtagtttccatggataactgctctcacaatggagaaaaattaagaaattctattctgaccatggcaaaagagtgggagaaaaaaggatatgtaacaggcgagtttgtaaattacatttcagatgaaaatcaggtgtcattcccatggtcaatgatcgataagattaccccaagaccggcagaatccgtctgcagatctttggaggaacttggcattgaggatattgcaccggtcatcacttcaaaaaatacatacatagcgccgtttgtaaacgcagagggaccacagtatcttgtgattgaagatcattttccgaatggcagacctgcattggaaaaggcaggcgtctatatgacagaccgggatactgtaaataaagtagagcgcatgaaagttacaacctgcttaaatccactgcatacagcacttgcagtctacggatgcgttttaggttataccctgatcgcagacgaaatgaaagatgaggaactgaacaggcttgtccatgaaatcggccctgtagagggaatgccggtggttacagatccgggtatcttatcaccggaagcttttgtggatgaagttatcaatgtgcgtattccaaatccatttatgccggatacaccgcagcgtatcgcaacagatacctcccagaaagtaggcattcgctatggcgaaacgatcaaagcctatgtggctcagtatggggatgcgaagaagttaaaagcaattccacttgcaattgcaggatggtgcagatatctgcttggcgtcgatgataagggagaaaagtttgaattatcttctgatccaatgcttgcagaattaacagctgccttaaaagatgtaaaatttggtgagaaagaatcctatacaggacagttaaagagcattttatccaatgaaaacattttcggtatcgatctttacaaagccggtatcggagagatgattgaagaattatttgtaaaagaaatcgcaggtccgggcgcagtgcgcgagactttgaaagaaaatctgacagattaaacaaatcaaaaaccaagccagaggaaaagcatgaaaattcctctggcttaatattttcgggaaattaacaagaactgaacagcccgtgcagcactgctaaattataaatgctacgccatttattagaaaaactactataaaacctctgctttttcaaaaattagttctttttataacactttatgtaacgccctgaatgttatagttagtataacaaaaaggatcaatatgtttttttgcagctctggcaaaaagtgcagcgagataaacattaaaatggaaggaagaggtttacgcagatgaaaaaggaaatgatggaaaacgctacaggcgtaaaattaaccaaaaaagccagcaaaaatgtgatcagatcgttatcggtcggattggcagcaatgatggcattatctactccgattgcagcatttgctgaggatgcagatggacagaatggcagtgaaacaacaccggaagagagcacgacaactgtaacaacacagaaatctgccgcagatcaggtgaaagatattcagcagagcgatgcggcaaagaatgtagaaaaggatacaactgcagcaaaagatgcggtaaatacagcagttgacacaacctttaaggatggcagtggcgcagaccaggcgacaaaagatgcagcaggtgaattagatactaccgcaaacggaaccttcgaaggcggtacagatgtgaatgtggcagaagaaatagttgacaaaacaatggatcgcatagaagatgcatcagatgccgcagcaagtaccgaggcagcggcagccgcagcaaatcttgcagcagttcaggagaaagcgaaggctcttcaggtggcagcagaggaagccaaaacagcaattccagagcttaccgatgcacagaaagcagcacttgagatcatcgctctggaaaaagaacgcgcaggggatacctccacaaactggagaaaagaagatgaactgttcaaagtgattcttaagaattactacatcccggaacttgcaaagggagaacttgttgactgcaagtggacctggaatcagaatgataacaaaaactattgtgaggtgacttacaaagatgtggcaggtgacacacaaactgtatatctgaactacaagctcaacgatacccgcgatgatcttgttattttcgagaaggcagaagaagtggtttcctatgatgtgaagggcacagacggaagtcttgcattcaatatcaatgcagagaacttcccggcagataagcttcagaatgatcaggataccgcagtttatgaaaataacggagtggtatacacaatcgtaaatataggtggacagttctatgtggtcgactcagcttctaaggatgtcgaggtgaacaataactacaacagcgaacaatatgaaacttctggtgagaaaaagatcacctattcagtggatgaaaatggcaagttggtcaaaacggtaaaacaaaacgtttccaagatcacatacacggaaactaaattatcttctgataagacatatgacaatgttgaggcagcagaaaaggatctggccgataaaaaagcagcattgaaagacggagataaagatgtcgagacgtccatgagcgcaacagcgactgcaaatgtgaccgtaagccagaaaaccacatttacgacaaccattgatttatcgaaaattgttgttgaaatggaaaaaatcaataatgataacgataaatacgagaaggaaaatgccaagatcgcagcaacggaactttttgctaaattcaccaacaaagaggcgttagagaacttgcttggcggcgattataagatcgaaagtattaataaagataatgcaaaagtgaatgctacagatcagtacaaaaatacttccggcagattggtagattggtttgcagattctgcttcctatgaaaacgtattttcaggcacgatcattattacttattcgcagacagtgactgcaaaagcagacgctgagaaatccgagacaaatgctgtaaatgcagcggataataaaaatctggaagagttaaaaggtcaggcgtatgatgctgcaaaagcagatgcagaaaaacttcttagagatgcagtttcccaaaataagaagatcaaagacaacctgaaagatggagaactgcatattaacggatataaaggttggaacggaaaacacgatcctaacgtagcaatcaaaatccattatgccgatgacacattcacagagggaaagaagacaacggatcaggcagttgttgacgagaagaacagctccacaaccttatccgtttcctacaccggaacttatcagcagaaaaattccaaagaacttggcgagaaggccgtggaaacacagaaatacaatcagacagccaaagcagaggaaaaaacagcttatacaagcaacagatattatgatgaatataagaaaacaggaaagattaacgaaggaatctggctcaccggaaaagaagataatcgtttcccagggcatgaaagcttaaagagcttcaaggatttcaaagatgcagcattaaaagcggaggctgaaagagcagagaaagtagcaaaagcggatgcaatcattaacgcagcagagaatgcggtgacagcagttaacgcagcaaaaaatgatgcggaaagcttaaagaagcagcttacagcacttcttgcaagccagaactacacagcagatcaggtaaaagagttggagggacagatcagcgcggcagagacaaaattaaaagaggcagaggatcttgcaaaagacctgacagataagttaggaattgcaggagaaacattggctgataagatcgcagaactcacccctgcaccggctccgggcgaaggcggttccacaacgacaccgggcggcgcaactactccatccggcactgaaacgacaccgggcggcgtaaccacaacacctgcaggcattgtaactacagctgcggctccggcaagtgcagtcacaacagccacagcagaagcggcactggttgagattgcagagacaccggtagcgcttgcagcagctgcaacaccggcggcagcaacgagaacagcagcggttgcaaatgtcaatgcagcagctgacgctgatacagatgacgatacagatgtgacaattgcggacgaggagacacctcttgcagcggacggagcgcaggagagcacgacaattgccgatgaggaaacaccacttgcagcagaagctggcgcaatggaaacaatgaagcaggagaaaatgtcctggtggtggttactcatcattgcacttcttggtgtaaccggcgaggaaatgtaccgcagaaataaaaagaaaaaagcagaagcagctcagaaagatgagaaataattttcagatcaatacaaaagagttgtgaaagactatcattagtcgcggggatatcaaaaggcgcatccaaagtggtgcgcctttttcaaaaatacgctcatccatgctggcatgattcgcgattttatgaaaattaccttgtctgaatcgttacacacatattgcaaaaacaccggatacagagtatcttgaaatcagcaacccgatcacacaacaaatttgtatacaaggaaataaaaaatgaaacataaaaaacaactcataatcggaatcattcttggtacgatgcttcttacttcctgcggcagcgcatccggcacagaccagacgacagccacaacagaacaaacaaccgaagcggaccagacagcagccacaacagaacaaaccaccgaagcagaacagacggcagctacagcagaacaaaccacagaagcagccacgaacacaacagaagcaacacagcaaacagaatccaccgaatacgccgaccgcaaaagcatcctcatcacagcgacaaacgaatgtggcgttgacatcggtatgttttccgtgattgacccaatcagcggcgagcagtacaacatcagtgcaatcgaagacggtcagtcggtttccatgccggtagaatgaccgacggagattaccgattttcagtgggcactctacaatcagaacggtgaactatgcgttgaggcaaccacagatatcagtcaggcggaaaacggagttacgcttcttctgaccggagacggcaatctggataatgtacaggaaatttttgaataacaattttacaggaacaaatcccggtcagagagcagcggatttgcgaaagacaataaaaacagggggaacctatctatggaagaaagaagagaaatatcgcgtatagcgtacaaagcaaatggtgttgtcgtaatctgcgacacacaggaaaagatttatgtgaatgtgaaagacatcagccctcttggtatgggaatccgtgtcccggaaggacacgaagggcttcttggaaaacaggtgatcgttgtggcagaaacactcatcatgtatgcggaggtttcccgtgaggaaaaacaggaagacggctccacattcataggtgttcatgcgataagatttacagatgacgttctgcagtatctgttttcacacattggttaatatcagactaacctttttaattcgcagttgccaagcagatgatcccagaaatgttcgagcggaacatcttcatactggcagataatactgcagtctaaggctccatgggcaacgatcagtacattttttccggaaacaaattccggcgttaaaacatcgtggataaaagagccgctgcgggcatacaaatgttcaagactttccgcaccatctacagcatgataatggacaggatcatggaacaacgtgtataccggacattccggtttctgtgtgacatgttctgttccttcatacatgccaaatcccatctcgcggagacggtcgtccgtcaggaccggcgtgccgctcccctccagaaaaagttcggctgtctcgtgagcacgctgcagcggcgagcaataacaaatatcaaaatgcagatcacaatacttttccctggcatctcttgccatttggcgtccttcctcattcaaaggaatgtcctcgcttccctgcagccggtgtgccatattccaatcggttcttccgtgtctcataatatacaacataacaatcattcatccttttcgttttcataggttactgtttcattcgtgtctcgttccggtaacaatcgcacgtatctgaatcgtaactcttgcagactaattcttgcgcgattgaattatatcctatattttgttaaaatgaaaccctgatcagaaaacagcagcggcacaacgcaggaaattgcatgacagctattaattttacaggaaaactaccgatatatgagttagaaaaataagcgttccggcatttacagagatccggaccgcaaccatggaagaacacaagcttatgcacacggaggtgtagaacaatggcaatagaggctatgaaaggggcagggatgtcctatgcgggaagttcatccgcatcagatgtaaaagcagagagtcaggcaaaagtggaaactgcatccaacacagcagcttctgacgatctcatgaagaaaaccattcagatcgacacgaaagagactgacaaaaacggcaaagacggaaaccgggacgacagtcaggcacagcagacgatctccgagaattcccagatcaggaaagcagttgacgagatcaataaaaaggcgcacaattccgaggcagtcttcggaatccatgatgcaaccaaccgtgtcaccatcaagatcgttgacaaagacacgaagaaagtcctgaaagaatatccgccggagaaaaccttagacatgatcgcaaaagtctgggagatggccggattattagtggatcagaaactgtagatcactgtccgggagacaggagcagcaatagacaagtgacaaatgaaaacagaaaacgatataaacaagttacaaaactgaaaggagcaggattatgccaatcagaatcacaggtctgaactcgggattagataccgagtccattatctcagcgcttgtatcttcttatagttacaagacgagcaagtataaaaaagcacagacaaaattatcatggaagcaggaggcatggagtaccttaaactccaaggtgtacagtttctacaacaatgttggtaaattaaaactgtcatctgcctacaatatgcgtacagcaagcgtatccgacagcacaaaagcgaaagtgagtgcggcaagcggtgcgaccaacggcgtacagtctctggaggtcttagaggttgccaaaagtgattatctcaccggcggaaagatttcgatcaaagatgcatccggtgcagaagataagacaaaaaccgtttcatcagcgtccactttaagcgaattgggatataccggaaccggtacgatcgaagttaccaataaagaaaccggaaagacaacaagcatcagcgttaccggtgacacaaagatcagcgactttgtgaaatccctgtcggatgcaggtgtgaaagccagctttgatgagaaaaacggcagattatttgtaagttcagcaaagaccggtacagaaaatggttttgaactgaaatcaaagaatgcggacggcgataaggcgttgctggcattgggactggcaatgacatctaccatatcagataccggtgcaaaagtgaatgacgataacaactggtcggcggcatcggatgcaaagatcaaactgaatggtgcagaatacacttcatctacaaatgaatttacggtgaatggactttctattactgcacttgcgaaaaccgatggcgagattactgtgtctgtcgatacagacagcgagggaatctatgataaagtcaaagacttgctgagtcagtacaattcaatcatcaatgaaatgaacaaattatacaacgcagattcagccaagggatatgaaccattgacagatgaagaaaaggactccatgagtgatacggaagtggagaaatgggaggcaaaagtcaaagattccctgctccgcagagatgattcgttagagaacctgatctcatccatgacaacggcgatgtccaagggatatgaagtcaatggaaagacatactatcttacttcctttggaatttcaacacttggttatctgaattctgcaaagaatgagcagtatgcataccatatcaatggtgatgaggatgacagcgcaacatccggaaacgaagataaactgctggcagcgatcaaagaagatccggattctgtggcgggattcatgcagcagcttgcaacaggtttatacgattctattgataagaagatgaagacatccactttaagcagtgtatttaaagtatacaatgacaaggagatggcttcggaatacagcgattatacaaccacgattaaaaaatgggaggataagctgtctgaacaggaggattactactacaagaagttctcagcaatggaaactgcactggcaaaactaaattcacagacatcttctttatccggtctgtttggatcatgataacaggacaattaacctgcggcaatgccgcaggttaaatctgcataaagaaaaaaggaaaacacatggaggtattttcacatgcttaatcataatggctatgctgcgtatgcgaatagcaaaattatgaccgcatcacctgcggaactgacacttatgctctatgacggagcaatcaaattctgcaacatggcaattgcagggatcgaggaaaacaatatcgagaaagcacataacaacatccggaaagtcgagaatatcatctccgagtttcaggcgacattaaatcataaatatgcaacagctgatgattttaataatgtatatgtctatttgaaagaacgcctgatcgaggcaaatatgaaaaaagacaaagaaatcttagaagaagtgttaaaacatctcagaaccatgcgtgatacatggaaagaagtgatgaaattggctgctggccagagataaccggaaggagaaagtaatacatcgtgacagataattacattggaatcatgatcgaaagtctccggcgaaaaaaggatgtcctgacagatatattaaaacttagcgaagaacaaagccttctgctggatgatcctaatttagaaccggacacatttgaaaaaaacgtgaatcggaaagcagcactgatcgataaattagagcagcttgacacgggcttcgaaagtttatatgaaaaagtaaaagaagaactggagagtgacagagacatccataaagagcagatcaggcagatgcaggaactgatcagggcacttaccgaattgaatatgcagattcaggcaacggaggcaagaaataaggaaaaggcaaccgccaaatttgcatatatcaggcagcaggcaaaggagatccgcagcagccagaagatcgtcaaggaatactataacaacatgatgcataaggcgtataatgagccgcattttttggataataaaaaatagagagaataaaagaccgcacagatagaaagatattgatttgtgaggtctttttagttacaattttaaggtatatagaataaaagatgtaagatgaaatatattaccaaagagaacaaaaagggtgaggtctgtatgatagataattatgccagaaatgtgatagataaatttgaatatagtgaagcaaaggaattctattattttgatcagataccgtttgaaaagtgcactccgaatgttcggaatatattgctgcaattaaaaccagtagcagtatatatggtacaaggcagaccgtttgtatcctttttttattgcacagaggcagaaaaaagaaatatggcatggcagatttggaatgcacagctggatattgctatctgtatttcaaaaacaacaatagagatatacaatggaaaaaatctatgcatagatacaatgcagccggaaagacttgaaaaaattaacgtttcagagaaaaaagattttccattttcttattttaaaataaaagatgaaaagtttcttcaaaattatgaaaagaaattgagaagaagaaatacgctgaatgatattttgcttgaaaatataaaatatgtaacaaatattttaaaagaaacatatcacattgcacatgcaacacaattggtattaagaattatttttatcagatatatgattgacaggggagtggacataggctatccgggatttggaacagatattttagaagcgcggtcaaatcttattaagttatgcgaagatagagaaaaattatatgaattttttgcatatttaaaaaagaaatttaatggaaatctttttgaattagcaacgggggaaagtgataagaatattgatcaggaggctttgaattggctggcaaaattcctttcgggaagagaagtgatgtcgaatggtcagcttgcatttatagatttgtatgattttaatataataccggttgaactcataagcaatatttatgaaatcgttttgggagaaactgcacaaaaaaatgataaggcattttatacaccggcatatcttgcagactatatcatacaggagaactgcgtagataataaaaaaaatgcaaaattgctggatccgtcatgtggatctggagtttttcttgttctatattacagaaaattaatcgaatcggactcagaacaagggtattcagatgaatatcttatttctacaatgaaaaataacatatttgggatagataagaatgcagaagctgtttgtgtggctgttttttcgttatatctgacaatacttgattataaaaatccaaaagaacttgccggttttagattccctgatttattgggtgaaaatataatatgtgcagattgttttgatgaagaaaaaataaacaatctgaaaaaacaacagtatgcttatataattggaaatccaccatggggaagagtggcagattctaagcttcatgtagaatattgtaaaaaacatcatttgccacagcaaaatgaagaaataagccggagtttcttatatcgggcaaaagatttttgcgagagcgatacaaagtgcgtttttattttgccgtctaaattattatacaatcaacaagaacctgcaaaagaagcacgtaaatatatgttgtctcaaatgcatatacagagtattacagaaatgtcgtctgtggtaacagaactatttgaaaatgctgcagcaccggcaatgatattatcttttcagtatcatgataaaaatgatgcatatgaaaaagaaatagaacatatatcatttaagccgaccatatattttcacctgttccatatgattgtaattgataaaaatgatgtaaaatatgttccagcaagattgctattagagaatgactggttgtggaaaacacttgcatatggaaatacgggtgattttgaaaacattaagagattaaagaaccggtatatgacaatcgaacagagacttcaggatgaagaaaaaaagatgatgcgtggaacaggggttcaatataataatggagatgaggatgcaacagaactaataggaagaaaattatttaaaccaagaaaaaatatagatcatttttatttaaatgatgcacagacaagctttgatacatttataaaaaagaaaatacatcggacaagagatataaaattatatcaggcaccatactgtttccttgcgaagggagtggatcctaagacttatagaatgagggcagtgtgctatgaaggagaaagctttgtattccctgaaacaatatatggaatatgcggagaaaaggatcaggtagggttgttatatgttctggcaggattgttcaattcttcattatatgcatatttcaatttcatgacaggtgcctcagcgggcatagacaggcgacagcgttttatgcaagatgtactaaagtttccgtttccacagagccatttgaaagaaatagaagaatgcagcagagagatacatcaattaaaaaaagagattatgattccagaaggattgatagaacaaaagcaaagtgagttagatgacataattgcagaagcttttggaatgaaagataacgtgtatttcaagtatgcaactgaagtaatgattcctatgattactggaaacactgatataggtatggaacagaataaagaggatgagatgtatacaaagtatgcaacaatattttatgattactttgcagacatatatgaggaacaaaatagatttgtgcatattaaaatgtatacaaatttaaaaggtggatttgcagcattggaattgaagctgacagataatcaatgtggagaaaaaatacagattgaaaagtcaggagatgcagcggaattctattctgttgtgtaccaaaaatataatgatgtattttgcaggagaatggacagctattggtttgaagaaaatcggtttcttattttaaaagcatccgggaaagaaaattggcacgaagcaaatgcatatatggatattgcagaagttacagccagaatactgtcagagtagaggtgggttatgaacagatttggagagaaaaataagcttattctggctgaaaacatgcagaaaaaaatcaagaaaatgttaatattatcctgcaatgcgttgagaaatgattttgaaattagagggtataaacttccggatgatgagggtgcaatcagttattatcttatagaagaatatctggacaatgatgaattccggagaaaaaacaaaatggaattcgtcaatatcagatttataccggaatatcctgaaaattacaataaggataaaggtaattacagaggaagacttgatatgaaggtgataggggaagatttccttcatgatcgtagtatctacgctgttatcgaatgtaagcgattggatggtgagaaccatttgaaacgtgaatatgtgaaagagggcgttgatcggtttgtaggaatactacagggcgagataaagtatttacgccatacaggaatggatatgatgctgggatatattgtaaaagatgtagacatggataaagttgtatctgatattaacggctatctggagaaaaaatataaagaaaattgtaaaaagcatattacggaaaagaagaaggaagatggctggttattgggagatagtatatttcaatgtattgacggtaatgaacgccaaatggagcatatgctctgcaagttacatactgttgtagggtgagaataaaagaccgaacagtttatggaaagacaaaatatattaaagaatattccgtgggagaactatacgtcaatacaaaaaagctttgaaaagcttggagaactctcagaacagaaggagtcgtgttaacaacttagaaaataaaaattaaaaaaggggttaagtatctttcacttatgccgatatacaatgcaagtaagcaaagaatgctacttcgtgaaaaccgaaatgaagcgtacggtcagagtaggaacgttcacaaataaaacaaatctacttcagcatggaagctgaagcccaattcaaggaggaaaaatattatggcaatggtagtacagcacaatcttacagcgatgaacgctaatcgtcagttaggaatcacaacaggagctcaggcaaaatcttcagagaaattatcttctggttacagaatcaaccgtgcaggtgatgatgctgctggtttaaaaatttctgagaaaatgagaagccagatccgtggtcttgacaaagcttcttctaacgcacaggatggtgtatctttgatccagacagcagaaggtgctttaaatgaagctcattctatcttacagagaatgaacgaattagcagttcagggtgctaatgatacaaaccagtctattgaccgtgatgcaattaatcaggagttagatgcattaacagaagaactggatagaatttctgaaacaactcagttcaacaaacagaatctgttagatggaacattctctgacaagaaacttcaggttggagcaaatgcaggacagaagattgagattacaatcggatctatgaatgcaaaagctattggtcttagcaagacaattatgccaacacagagtggatattttaaggctacgggtgtgagcttaaaatcatctaagtttgttacatctggagatgttaaagcatctgcgacagcagttggagctaaggtagcaagtaaggcagcaaaaggagtggcagatggaacggtattgacaattgaaggtagagaatataaagtatctgacaaaacagaatctgccaagggagtatatacagctgatgatttgaaaacgaaagtgggttgtgtgtttgctcagacagcaaagatcacactcaagaattcagtgccttcagactcattcatgggcgcaagagtagatacatacgaaattgcaaatgcaacaattactaaggttcaggatgctattaacaatgtttcaagccagcgttccgcacttggtgcattacagaacagattagagcatacaattgctaacctcgataatgtatctgagaacacatcagcagcagagtctcgtatccgtgatacagatatggcttctgagatggttaactacagcaagaataatattcttgcacaggcaggacagtcaatgcttgcacaggctaaccagtctactcagggtgtattatcattattacagtaatttaaaacaaacagaaatagtgaaagggattggcaatggtcaatccctttttcataaggtgcgtagaaatgaaagaaaaagatattatatatcatgcaataggcgagattgacaaattgtgtcagaaaattataaataaagaaaactatatgatagacatgcctgcatgtatccaagcaataaaccaggcatgtgaaatcattttaaaatataataatcattcagaagaaatcattcctatattagaggatgtgatgtatggaatgacacaacgtgacgaagtgttcttgcttgatgtccttagatatggtatgaaggataaattggaacaaatgtacgatggtttaggaatgaatgaagcggagaatgcttatgagtgaatctatatatgaaaaaaatataaaaaaaatacagcagaagttcgaaagctgggcagattttataacaggaggaatgtgtaaaaaaagtccacatatccgggtagaatcggatactgcaatggatggaagccggatcttcagagtatccaatgagggacaggtattgtatctgaatggaaagtatcatccgtcacatgcggcaaaagactggctggaaagcattggaaaaatagaagcttttgcaacagttatcattgtgggaatacatgatggagttcatatcaggaatatattagagaaagtggagcctaatacgaatattttgatatatgagccatctgtggaagtgtttctaaaagcgttagaggaagtggatctgacatttttgtttgaggataatataccggtaggtattgtagtggatgggatcaatgagaaagagcttgagatttatctaaacactatgattacttacgacagtatgacgaagttaaaggtgtatatatcgggaaattatgacaaattatttgctgaaaaggtgagtggttttgtagatgatttgaagaaacgtgtactggagatagaaaaaagctggaatacagtagttcgttatacgagtgtaaatgccaataatgtatttcataattgcaagtatatatatgatggatatagtatagattcgttagcaggtctgttgccatcagatgtgccgacgattgtagtgtcagcgggaccgtctttgaacaaaaatattgaggacttaagagcagcacagggcaaagcaaatattatagcaacggatacagcgatgaagccgcttctgaatgctggaatcatccctaatctatttgttgtagtagatggcttaaagccgggggatttatttaagcataaagatatttctaaagtaccgatggtcactatgactgcaatatcggtagaacctatggagcttcataaggggaagaaatttttctatcagagcgattctatgatagagacagagcttatgacaagaattgccaaaaaagattccgaggcgaaaggaataccgattctaccgagtggaggatccgttgcaacgtcggcatatacactggggataggtatgggctctcatactataattcttgtggggcaggatctggcgatgactggtaataggacgcatgcagacggaaccttcaagaccaagatggatgagatagatgtaaatagtggagagtattttgagattgaagctgttgatggtggaaaagttctgacccgaatggattttaagctatatctggattggtttgaggaacaaattagacgtcagacaggaatccgtgtgatagatgcaacagagggtggtgcgaagatacatggagcagaaatcatgacgttgaaggaagcaatagagaaaaattgcaaaaaagattttaatgtcagatataagatatcaagacttccaaaattgatgggtgaaaaaggaagggaagaatttttaaaagtctttgaagagataccaaagagattgatagctgttgagaaaaaggcaaatgcaggaatccgtcagtatgaaaaattggaaaaaatgtctaaaaataaaaattatcgtgcggatgaattgcagaaattattaaagcagattggaaagacgaatcattttatggaaacagattacatggcatgtgtagtgaatgatagtctaaaaggaattgaatattcgttaagaacatcaatttatgataaatgcgacgaaacaacagatgaaatgtatgatatcgctcaacaggggaagctgatgcttcaggcagaaaaatatgcagttgaagaattgttaaagcttgcagaagatacaacatcagcatttgcaaagaaacagcgagagaaaaatgctaggaaaaaggcaggaactaataatggcaaatagttatgaaattgaggtacaggcacagccaagtatttatttacccaaagagcgtaccatgaagattgctttttcagaacctgaagcaggggtggatgaggaaacaggaatactgttgattatagcaggctatggagggcaactatcgtcaaatgtatataccaagatgagaaaccagtttgccgatgattataatttaatgacagttcaatgtgattatttcggatatcagtatatgggaagtgattatcctgtagtagtagatgacgaacttctgaaaagttcgttgtcggctgcagaattagacttgctgaatcgggattatgagcgatatcggcatatattgcagggaaaagtattcacgcaggatattgagttgggcgaaacgccgtctgatttcaatgatatgggattaatgcaggcgatagataatgtgcgtgcagtaaagatactgttagatatcataaaagaaaatggctatagtattaacgaaaaaaggatatatgcatatggtttctcacatggtggatatctggcatacttgtgtaatgcaatgtggccggggctgtttacaggaatcatagataacagtgcttatttaattccgttttttttgaagattccaagaaagtgtaacgtgtttcaggaaaatatacaaataaaacaaaaaatagagtataaggcattagaatatgttaaagacgagcagattatggagctgccatatatatattcacagtttgataacaaagcacagatattgtgctatgctggtgaaacagatgatatgacaagcttggaagataaaaaagcttttctgaataaggtggagcatacaaatgtcgcaactgttacacgatacaatataaaccgagagtattttacgactacaggtcatggtcttggtgcagattttgtgaaactgttccgattggcatatgattcatttctggaatctgaaacatacaagtgtaaagaacataaaattacgatggaagatgttgaatatgaaacagatatgtttcgatataaggtgatgtgggaagatggcattccaatgttatatcgggaagaaaagtgatatatgggtagaacaaaatgttgagatgggagcgttattattctaggcaacgaggattgatatattttgataataactccactggaaaagagagacagatatgagtgtgatgatcatcgctgaagcaggcgtgaaccacaatggcagtgttaaactggcaaagcaaatgattgaggaagcagcaaaggcaggagcagactatatcaaatttcagacatttaaaccggaaaagctggtttccaaatatgcgcagaaagcagattatcagaagaaaacaacaggcagtcaggaatcgcagctgcagatgttggaaaaactggcattgtcatatgatgattttgtggaattgaaaagatattgtgagcaaattggaatcggttttctgtccacaccgtttgacgaggacagtatccggtttcttgatagtctggacatggacttctggaagataccttccggtgagatcacaaattatccatatctggttcagattgcacagaccggaagggatatcgtgctttctaccgggatgtgtgaaatggatgagatagcggatgcaatgaaagtattggaagagaatggagcagggaatatttcgctgctccattgtaatacagaatatccgacaccatacgaggatgtaaatctgctggcaatgaagcagatgcgtacagcctttaaaaagcaggtgggatattcggatcatacggttgggattgaagtgccgattgcagccgtggcattaggtgctgagattattgaaaagcattttacattagataagaatatggaaggtccggatcacaaggcgagtctcgaaccacaggagttggcacagatggtcagtgcgatccgccatatagaaaaaagccttggtgatggcaataagaaaagaacagcttcggagcagcataatatagcagcagcacgaaagagcattgtcgccaaatgtgcgatttctaagggagatatttttacagaggcaaatcttacggttaaaagaccgggaagtggaatcagtccgatgaagtggaaagagttgatcggcacaaaggcacaaagagactacgtggaagatgaactaatataggacagataaaagtggatggacgttatatgaagaaaattgcagtggttaccgcaacacgagcagaatatgggattttgcggccattaatatgccggttacaaaaagatacagagtttgaattacagttgatcgttactggcatgcatttatccgaaaagtatggcaatacacaggtggagatagagaaagataaaatacctgtttttagaaaaatcccgattttggaagatggaaacagcgcatatgatgtttcagttacaatggcaaatgcactttgcagatttgcaggatatttcggggacgaaaaaccggacatggtaattgttcttggggatcggacggagatattgggcatatgtgcggctgcaatgaacgaggggattccgattgcacacctgcatggaggcgagctgacagaaggtgcagtggatgattgtatacggcatgcagtgacaaagatgagttatttgcattttacagcatctgaaacgtaccggaagcgagtaatccaattgggagaatcaccggacagggtatttaatgtcggagctttaggtgtcgaaaacattttgcatgcaaaattgttttcttatgaagatatatgcagggaaatagggattccaatcaatcagaaatatgttgttgtgacgttccatccggtaacacaggagcctggagaagaggaacaccagacacaggaattaatagcggcaatgagggagaaatccgggaatttttatttgatgacgaaagcaaatgcagatgctggcggacagagagtgaacgaattattggaagatttttcagagaaagtacctaatgcaaaattagtatcatcattgggaatggttcggtatttaagtgcattaaaatacagtgaatttgcattagggaattcttcaagtgggattattgaggcacctgcacttgggattccgacagttaatattggagagcggcaaagaggccggctgatggcagatacgattgtgcagtgcaaaccggagaaagaacagatccttggggcgatggatgaagctgctgcaatgccacatagggtatcgacactttatggggatggagagacatcctccaaaattgtagcaatattaaagaattttttgctttatgataaaattaatttgaaaaagagattttacgatttggagtagtatgagaaacatagcgattattccggcccgaagtggctcaaaaggattgaaagacaaaaatattaaagaattaaatggcaaaccactcatggcatataccattgaggctgcattagaatcagggatatttgattgtgtgcatgtgtcgacagacagtgagaaatatgctgaaataggaagaaagttcggggcggatgttccttttttgagggattccgaactggccggggacaagagcagtacctgggatgcattacgttatgtggtgcaggagtaccggaaaagaggaaaagaatttgaactggtaactctgttacagccaacttctccgatgagaaacgcccggaatatcagggaagcatatgaggtatttgaacagaaatctgcagatgcggtcattagtatttgcgaattagaacattccattcagatatgtaataaattaggcgaaaatggttcaatgtataattttattgacagcaataaagttggagccagacaattgtcggatacttattatcgattgaatggagcaatctatattcagaaaacagagctgctgatgaataagcagaatttttataacgaaaaatcttatgcatatattatggatcagagacattctgttgatattgacaatgaacttgatttcttattcgttgagacgttaatgaaagataataaagattaatttttgcagtcgatcatccgatatatagactgtaacctatcatggagcgataggaaaagaacatggaggttcgtctatgaaaacagaacagttaatgacatttctgatttccccggagcagacgattgttgaagcaatgcagaagattgatgcaaatgcgaaggggattctttttattaccaatacagatagaaaattaataggggcgatcactgatggagatatacgccgctggctgatcaagacagggaatctgcaggaacggataagccgccttatgaaccgcaatcctaagtccgtgtatcgaagggaagcagcgtctgcacaggatgtgatgagacgatattcgatcactgcattgcctgtgctcaattcaaaagggattgtgattgacattctttttgaacaggaacagaaaactgaggtgagggaaggaagtctctctttagataaagtgccggtagtcattatggcaggaggaaagggaaccagattatatccttataccaagattttgcccaaaccgctgatcccgattggggatattccgattatggaacgtattattgacaaattcagggatttcggtgtgacggatttttatgcgactgtcaattaccgcaagaatatgatcaaatcatattttaatgatacggcaaaagattatgaaataaagtatgtagaagaaaatcagccattaggaacagcaggaagcctgcggctgatagaagaagattttgaacagccttttatcgtgacgaattgtgatatactgatccacgcagattacgaagatgtctaccggtatcacagggaaagcggcaatgaactgacaatcgtttctgcactaaagaatattgtagtaccctatggtgttatccattccagtgaaaatggtgcagtgcagtctatggaggaaaaaccaaagctgtcttactttgtaaatactggtatgtatatactgaatccggaattaaagaaggaaattccagaagatactttttatcatatgacagatctgacagataagttgttgaaggaaaaccggaaggttggtatgtatccgatcagtgaagattcgtttcttgatatgggtgaatttgaagagatgcaccggatggagaagaaattggacttgaagtcagagtaattacaggaaataaagggcttacataacgttgaatttaataatagtatgtaaccatatgagcaatggaaaagctctgacagagcgattttgcgaatgtaggctgaatagataataaggtatatataaatagacgaaagagcgaggaatatagaatgaagaaagtacttgtaacaggagcagatggatttattggaagccatctgacagaaagtttattagaaaaaggttataatgtaaaggcatttacatattacaattcatttaatacatggggatggctggatactttaccaaaagaaaaattagatcagattgaagtatttagtggggatatcagagatcccaatggtgtgcgtgaagcaatgaaaggtgtggatcaggtgtttcatcttgcagcattgatcgctattccatttagttatcactcaccggattcttatgtggataccaatattaagggaacgctgaatgttttgcaggcagcaagagatcttggaacagaaaagattatggtgacttcgacatctgaagtatacggaacggcacaatatgtaccgatagatgagaagcatccatttcaggggcagtcaccgtattctgcaacaaaaattggggcagaccgtctggcagagagcttttaccgcagctttaatcttccggttgcaattgtacgtccatttaatacattcggaccaagacaatcggcaagagcagtgatcccaaccattattacacagcttttagctggaaaggaagaaatcaagcttggttcgctgacaccgacaagagattttaattatgtaaaagatacagcagcaggttttattgcaattgctgagtcggataagacagtcggacaggagattaatatagctacacagcgtgaaatatctattggtgatctggcgaaggagattattgcgcagattaatccaaatgcaaaaattgtatgcgatgaacagcgtttgcgccctgaaaagagtgaagtaaaccgtttgcttggagcaaatgcgaaaataaaagaactgacagactggaaacaacagtatacatttgaacagggtattgcagagacgattgcatggatcagacagaacatgggtgcatataagacagatatttataatgtatagaagctatcatgatgtaaactggatttgtgagcaagattgacagatgtgtttttaataaaggaaagaaggaagaagaaagtgagtcgatttatcccattgtcaattccgaattttgagggaaatgagagaaaatatgtagatgatgcaatagatcagggctgggtatctacaggcggagcctatattacaaaactagaagaacagatggcaggatttcttcatgtagagaaagtggctgcctgccagagcggcacatctgcattacatttgtcgttattagaatgtaatgtacagccgggagatatggtgattgtgccgacattgacgtttattgcagcagtgaatccggtgcattatcaatttgcagagcctgtatttatggattgtgatgacagcttatgcatggatccggtcaagctgcggaagttttgcgaaaaagagtgccatgtagaacaaaaacaattaattcacacggcttccggcaagaaaataaaagcggttattgtagtgcatgtgtttggaaatctggcagatatggaaagcattatggatatagcggaagagtatcatttaaaggtaattgaagatgctacagaagcgctgggttcacattacacggagggacgttttgccggaaagtatgcgggaacgatcggagattttggagcatactcatttaatgggaataagatcattacaaccggtggcggaggtgcagtgacagcaaaagatgcaaaaacggttgcacatatgcagtatatttccacacaggcaaaggatgatccgcattattatattcataatgaagtcggatataattatcgcatgaccaacttacaggctgctcttggagtggcgcagatggaagaattaccagaatttataaagagaaaacacagtaattacgaattgtatcagaaattgtttgaaggatttacgtatggaaaattacttggttttcgagaaggaacatattcaaatcagtggttttattcgcttgaaattccaatggaaagagtgaatggttctttaagggatatcatcacaaagctgcaggaaagaggtgtacagacaagggcaatctggggattgatccatgaacagctgccatatcagaatgcgataacatatgagatggagaaagcaccttattatagtaaatgcatcttgaatttcccaagcagcacacagatcacagaagatgatatagtttatgttgtggaacagatcaagaatgtattgatgtcataagggatggtaaaatgcaggatattattttagttggttccggtggctgtatgagggaaattgtgtggcagatacaggaacagaataaatcagcagaaaattggaatatattaggatatgttgataaaatgccgccggaagaacacagcagcgttacagtggggaatcaaatcataaagtatattggaaatgatgattatttactggcaagaacagaattaacaaacgtggcagtctgtgtgggagagccaaagcttcgaaaaaaaattgtagagaaattgaaaaataataaaaatattattttcccgaacataatacttggtgatacaagaatttgtgatgatgtgcagatggggaaaggctgcattatcagtatggatgcaagaatctcaaccaatgtaacgcttgggagttttgtttttatgaacaccggaagtaaagtatgtcatgatggaaagttaggtgattatgtaaccttaagtccggatgtcacattggcaggaaatgtgatagtcggcgacaatacagaaattggtatgggtgcaaatgtgatacaggggattacgattggagcgaatactgtgattggtgcaggttcggtagtcgtgagaaatgtggaagatcattgtaaggcagccggagtaccagcgaaagcctttagacgataagaagtctaaaggctttttaaaagtttgtggaaactatttcatttgcgaataagatgggttatgctactattaatgataatgaatgaaaatcttaacttccaatagaagttgatactcaatcgaaaataaatgctcaaaacgggcagaaaatcagcgattttctgcccgtctcttactataatgaatgagtatgacaaggtatataagctggacaagaaatataacatttccaagagaaccacgataggaaagaagtgtgaagatgatgatgccactatactttggtgtaagtggaacaactgttgaacgaactgtttttccatcggatgaaagaaacagaagtatgagagtttataccggggatgcattggcaggaaaaatgctggttgcatttgttgctccgatcatcaggaaccgcatgtatacaaagcttaaggatgaagaagaaaaactgctcagttccccgaattttatgaatgttcccgcagcaatcagggaacttgagaaaatagaaatgatacgacaggcagccggattatacgcttgagatacagaataatgaccagacgataaagctcactgtaaaaagcggacttctgaaaccgtatctatataaatcgaaagcatataagcggaatgatacagcaacgatagaggtagacactctggagttttcgaggctcgtattggatgaaaaaaatattcgatttgaagaactgccttgcaaagatcaggaactgtcctttgaaattttacaccgtaagctgaaagaaaatatccggatcgaaaattttaatcaggacaccctgaaaccgtgcaaagtttttgctggcggggacggaagatatcagaggacagttgaaggaaaaaagagtttcatccgcaggaaatagaagaagtgtcgtcgaatctggagttaaggcaggaaaaattgcggaagatgaccgaaaagatgcagcggattttgagcccggaacgtattaatacatacgtggaagcacaattaagagaccggcagaaacttcgggcgtcagaacttccattggcaagtatggatgattttatgaaaatgatatatatcagattatatggttccagaaaaaagatgtgttatagaattgaaaagtcagataaaggcaaaaagatcaggatgaatttcgcagaatctgaaactgtatgagtcagttattttgctgatactgcgtattctgtttgatgagacgaaaaggtaagctttgtggaggagtatcgctatgtcgtcaatggaaaacaagattctgaatgatcttttggataaatacgagattggacactttatttctggagttgcagaagttgttagaattatacagtgagtatggatcggcagaggaaagattgaagaaatttaaaaagaataccggaaacggcaaaattattgcacacaatatacgactgtaattagatttattgccgataacatggtatactatatatagatatgtacatttattctatttataacggaggatatacaatgcgatatgtttcagttactgaaatagcaaagcaatggaatctgtcagaacgcagtgttagaaactactgtgcgcatgggcgtgtaccgggggcatttcttactggcaagacctggaatattcctgaaaatgcggaaaagccagagcgttctaataaaaagaaagaacgatctatcactttattagatattttacaggagcagaaagctggcaaatattcaggtggaatttatcataagacacagattgatttgacatacaattctaatcacatggaaggaagccgtttgactcatgatcagaccagatatatttttgaaaccaatactatcggtgtagaaaatgaagcacttaatgtagatgatgtgattgaaacggcaaatcacttccgttgcattgatatgattattgataatgctaaagtaacgctgactgaaaaatttattaaggaacttcatttgattctgaaaaatggtaccagtgattctagaaaagattggtttgctgtcggtgactataaaaaattgccgaacgaagttggcggtatggatactgctcttccagaagaagttgctgataagatgaaagttttattgatagaatacaactcaaaagaagaaaagacgtttgaagatatcttggattttcatgtgaagtttgaacgaatccaccctttccaagacggtaatgggcgggtaggcagattgattatgtttaaggagtgcctgaaatataatattgttccgtttatcattgaggataatttaaagatgttttattatcgtgggttaaaagagtggaataatgagaaggggtatctgacagatacctgcttgacggcacaggataaatataaggagtatttagattattttagaattaagtattgagagaatagattcccagacagagtattaaaagctgattctaaaggtaaatattctagggcgatgaaatcgcacttacggaaatttggaaatcagatgtccggaagtggaaatcacctgtgcgattacaattttctattcattttcaaggaaagaagaatgactgcaaatcaatccccagaaacatgtatagaaatcaggccgattataatgaaataacataaaatgttaaaaagtaacataaaatatgttattatacataaaaacatgttacaaggagacgccatatgaaaaagcaattagagcagtatttcggctgcaaagtaaaaattgcagaatacaagaaaaaattaccattgccgatttttatgactatgcgtgatattacgatggttgaaatatatggtgttaactttgcagtcatagatgttatgaaggaaacagagctaagtgttgctgcaatgaaaaggcagaaggcaaagtatgaggaagcattgcagtgcccagtagcatatgaagtagcgttaaacagcatatccatgagaaatgctctggtaaaaagtggtgtcccgtttgtggatttgccgggaaatgtattcttaccatttatgggaattgtattgcaggatgtgtatcgaaagcaacttgtcaaagcggataagatgatgccggcaacacagatggtgttccttgaattgttatacatgaatgacgaggaatctgcgttgaaaagtgaagttgcgaacaagctgaatcttaccaagacgtccattacaagggcaacagcacaattagaggaaatgggactcatccggcaggttaaatccggaacagagattgctattaggaggaattactcacgcaaagagtattatgagaatgcaaaagcatatttgattaatccggttcaaaaagaaatcacaattatgcgatgtgaagtgaccttcaaatcatttattgcaggtgaaaccgcacttagtcaggagtccgaattgaatccaccaagaatagaggaacgtgcaatctacaagggagaggaagttgttgatcagttggaaattgtggatgccagatctgaagatcccggcgactgcttgaaggtacaattatggaaatacaatcctttctattttgcaaaagaagggtgtgttgatcctgtttcactggcatgtacattcaaaggtaacgaagacgaaagaatagaaatgagtattgaggaactgttggaggaattataaattataccgggcatagactcttttagagaaaaatttagaaattatacggattattacactattatcggcggaactgcctgcgatattctactctcagaggcagacttgccgtttcgggcgacaaaagatattgatatgatcctgattatggaggataactttccggaatttgcgagcgtattctgggaatacataaaagaaggcggctataagtgcggatggaagaatgaacagaatatgcacttttatcgcttcacagaaggaaaattcggttatccaactatgtttgagttattttcaagaaagccgggatatcatcttgaaataaaagagggaatcattccgattcatattgatgatgatacttccagcttatcagcaattcttttgaatgatgacttctataaatttatgatgtccggacgcagagtggttgatggtattggtgttttgggggcggagcatctgattccgttcaaaatgtatgcgtggattaaccttttggacagaaagagagctggcgagcatgtcaatgaaaaggatttaaagaagcataagtacgatgtattccgcttgctgcagattgtcacatcaggaacaaaagttgaatcagaaggtctggtgacagaaagtattcatagatacattgaggaaatcagtgcagtagatgaatcggaggtacgacttttgcagatgggaatcaattcagctttttaatgttgaagccttatctaaggaagagattgttgcatgtgtaaatgaaattttattgcatgtatctatggtatatgatatggactttaaggtgtttgaagtcgattcgttgattaaatgtgaaggagaggctcctatactacgggtagaatacactccgattggatttgaagaggtccctatgttctatttatcaaatgctaacaatacgaatgatgagtgattcaaatttttaagttattatcaagtaatagagtatttctttgttcgagcacaaaattactactttttggaagaactgaaatctattgatatgaataatgttaatcacaatgaattaagaaaaattttagcaaattataaaaaagtaacaaatgaacgtgaagcattaaaacttgttttaaagagagcaatcgatatccccaaatttaaaacatggataaattcaaattcagagcattttgatatttattgtagatcacaaggctataaaattgatctttcaaaagaagacaaaaaaattatttctaatatagtagaaagagtatatggatatagatgttccatcgctcatgcaaaaggtgatgtcgaagaatatattgcgattcccaacattagtagaattctgctctgatttgccacattccggtatttctgagcaaaacacaaaaaactcgaaattccatgcaaacaagggcattccggggcaattcaaggagaaacaaaactatgattaaaatacttttcatctgccacggcaacatctgtgtaaatgcttaaaaagcatgtaaaatcaatggtttaagaaaatggtaggggaaatttgcccctgttttgcccctaataattataggactacccgataaggaagaatcccttagctgaatgaataggctgagggatttttcattattttaatacttgaatacatcaaaataatattgaaaaaatcaatatattcaagtatacttattttagtaaacgggctacagagctatgaaactgtaacgagtttattattaggataggaaggatcaactatgactgtaagctataataaattatggaaaagacttatagatctaaatatgagcaaaactcagcttagagaaaaagccggtataacaacaaatgcaatagcaaagatgggaaaaaatgagaatgtttcgacagaaatcatatgtaaaatatgcaaagtattggaatgtcaggtagaagatgtaatcgaattagttgatgaagaagaaaaagaggtatgttagcatagaagagtccattttatgggacacatactatgatattattagagaaaaagtaacgaggtgacaaactataaacagtcaagagaattttgaaattttttgaattgtaaaaatgggtaattttaataagccatctgaatacatcgtat

SEQ ID NO: 14310 - DNA, 112232 bp, Unknown
  gut microbiota DNA sequence
ggcagaatccggaaaatcggctctgcccatttgtaactattcataaatcttatatcagtttttaacgtttacacaaaacttgaaacggtctcaattttattgcccgctattatccgggtaaatcacatatatcttatccaatccataatactttgctatataagcatttgggaatggatcatcggaatcttccccattcatatcaagcagtccatatttgcagcagtactttgttgtggaggtaatgattggtacaccaataaccgtatcacctgcggaaacagcagattcaattgttgtatcacgcacagcctgttctttatgaacacggtagatatcataagaaccttcccaataactcatcagacttccgacaatcaggtagatgcagacacaaagggagacgcattccaagcgggtattgctgcgcagcaactgtaataactggacaatgccgattataaggaacacaatcccatttgcgaggcttcgttccgggagatagcttgcaatcacaagcattccggaagcaattacactgataaagaagaatgcaagggaaatgaggatttccttcttatcgagtttgtaatacaaggcgataccaagcagcacgaagaaaaaaatcagaggaattctgcaggtattataatattcggtaaatatttccacagcattcttaaaaatcaggggaagtgacagattttcggagaacttggcacttccggatggactgagtaataataagagatacccaatggctccgcatacgacaggaagaacataggtaaaataggatttccagttttttcgttgatacattacaatgcatagaagaataaatcctataaaaataacagaaaaagaaacattctctgaataatttccaaagagaaatgtgaagatacagaaaagaaacatcttccatttcttatctaacagaatcctgttacgaattaatccaatataaacaaaaagataagtcaacgcaaaaagataactccacatataattaatagaaccatccagccacagaaaaatctgtccatatgcaggcatataaagccagagcagtgtcgggatagcgaaaaataataaaagactgaatttcttattccgtgaagtgaccttgtatatgctgataacaaataatacaaagaaaacagcatttacgatgttaaagaccgatttcgaaccgatcagaaacagcatgacaaaaaagtgggaaacaatgcgtccattaccatagtgcatatagtgctctgccagggattgaaaaatctgcccaagagaagtgatccggctcccatcagaaaaattgaacatatagctataatcatcggaagcataaggagtccagtgattgaacagcagtgcacatataaggaggcacagactgccgattattaatttataatttttatgatctgataaatgtttcataagttcacctgtccatttctatttatgaatacctaattttaacatatcagctggtgccatgcaatttattcatccagagaaataataagactgaaatttgaagtatcatttggtcgttttatggtataatcaaaagaactaaaaatgtaaggaaagagtgagaatatgctgacagtaaaattactcccggcaggatatggagactgcatacttttatcattaggagaacatgacaaatataatatattgatcgatggcggagtagctggaacatattcgaaaagaatcgggaaagagctgtgcgacttgaagataaaacttttccatcagacaacatttccctttggaaaatagttctctgttggggaacaggaagcaatgataccaaactaagggacatggcaagcaaaggacttacgaatttattccgtttgtatccagatgatatgacggagattgcagagttatttgcagatgtggaggatgattacattcaggaaagactctggcaggcaatctattcagcaattatcctgcgagcagagaaagagtacgcagaaaagatgatatcttatattacaacaaatattgtagaagaaggaaaatggccacagaatgtactcgtccgggattatctgagaaatatctttgagtatgcttattacagggaatggtgttcgaaagaagaggctgcgagtgtaagaccgccttataagagctgcaaacatgttacggataaaacaagggcagaagaaatgaaggatgcatatgacaacctgtactggaattgccagagcagtgattttgctgtctatacgataccaacagaagtatctgattacggtctttccaggaaagatgttggtaagatggtgtttgaggatattatcagaactggatatgaagtggtttcggaagaaggatcaggagaaatacatagcgaagctttttacgacaaactataaaggggaagaatattatgttctgcagtcgtatcaggaatcatcagaaccaaagaaggaagattattgcagagtctggatacagatacggtcgtatttctatgaaaaaggaaaaaagcaggagctgctgaagtggtttcagaagaaaaattttgatggacgctggatgccggaaggaacaggtgagatgtatagaaactgtctgggagaatatccatggagtccggatatggtgaattatcttggcgaagaagaggagcagaacttccgtcaggagaaaccggcaccgtgttatctgatcgcaactgtaaatgactatctcgcggaaaaagattcaccattttgcaccaatgaagatattagttacatgttaccggctgtatatctgatggaggagatgaatctgcaatgggatggagaatatgcttatagtgccggaggagaaaaagttattcatatgggagatcatgatgcgatgtatattaagaaacagtatctacttgcctttctggaggaacacaatctggatattgtatggacagtattgggagagaaacagaagataacagaacacacggatttcccgggaatggcggaattcagctatacttattgtctggatgattcagaaaaattgatacgtaatcatgaattcagccagatcagaaaacccttccggagataatcaaaatgcacaaaaaagaatgtaagaagacactgatttttaagatattctgaagaaaagcccggatacgttgttattcacttataattgtgttaaaatatattagattagctatcgataaaatgttataaaggggattgctatgtatcgaaagaggaataagggatggttgaagcatcttgactttgctgtccttgatctgttatgtatgcagctgtgtcttgcagcagcatattatggaaggcatagagagcttagcagattatatagagattctgtttatcagaatgtcgtgttgttactcgtcgtatttgaatgtttgtatctgtttttcatagatggataccgagatattctaaaacgcggttattatattgagatggtgtcgacagtgaaggaagtatgtctgctggaattattgcttgcattctatctttttgctgtgaagtcaggagatgatttctcgaggacagttctgttcatgcttggaatctatgaactggtcggaggatatctggtacggatcctgtggaagaaacgcatgatcagacatcaggcagaagatggcaagaatgccctgcttctggtgactacaccggaatatctggaacaggcacttgagaatatccgtaatcataattttatgacatattttctttctggtattgtactgatcggaagagagaaggatgatatttatgaggggattacggtcataccggaatccgggatgagtgagtggacatgcagaaactgggtggatgaagcactgatcgtcctgccgcaggagcagcattttaagaaagagtatatggaagccttttcagagatggggattgttacacattattctgtaatgcaggattttgcagactcagatcatcagcagatcgcagagaatgtctgcggatatctggttctgacttccggaatgcagttcgtaagcaacagacagtatctgacgaagcgtctgatggatattgcaggtggtatggtagggtctgttattacactggtgcttacaataatccttggaccaatgatctacatcaagtcaccgggaccaatctttttcgcacaggaacgtgtcggaaagaatggtaaaatgttcaagatgtataagttccgcacgatgtatctggatgcggaggaacggaagaaggcactgatggagcagaaccgtgtctctgatggtctgatgtttaaaatggaggatgatccaagaattatcggaagtcattttgatgcaaatggaaaatatgtgccgggaatcggaaatttgatccgaaagctcagtctggatgaatttccgcagtttttcaatgtgctgcttggtgacatgtctctggttgggacaagaccgcctacagtggatgaatatgagaaatacaagctgcatcataaagcaagattgtctgcaaagcctggaattacaggaatgtggcaggtgtccggaaggagtgatatcacagattttgaggatgtcgtgaagctggatacagagtatattaagaactggagtattggaagggattttaagattcttgctaagacagtgcaggttgtattgactggaaaaggaagtatgtaatgagtgagaaagaatgtttgtttagtgtgagggaaaaattttatgcagcaggtggcaaataaagaaaatttaaaaatctgtttagtaggctcatcaggcggccacttgactcatttatatatgttaaagcctttctggaaggacaagaatcgcttttgggttacatttgacaaagaggatgcaagaagccttttagagagtgagaaaatgtatccttgttattatccgaccaatcgcagccttaaagcattgattaaaaatactgctattgcttggaaagtgctgcgtaaggaaaaaccggacttaatcatttcttccggtgcagcggttgcggttccgttcttttactttggtaaattgatgggtgcaaaactcatttatatagaagtatttgaccgcattgataagcctactgtaaccggtaggttagtatatccgattgtagacaagtttattgtgcagtgggaagagcagaagaaagtttatccaaaagctatcaatttaggaagtatcttttagaggggaaaacgatgatatttgtaacagttggaacacacgagcagccgtttaacaggcttgtgaaagcagtagatgaattaaaaagagacggagtaattaccgaagacgttattatgcaaaccggattcagcacatacgaaccgaagtattgccagtggagcaaactgctcccttatcagcagatgataaagaatgttgaggacgcacgcattatcattactcacggaggccctgcgagctttatcatgcctttgcaaatcggtaagacacctattgttgtaccacgtcaacaccgattcgatgaacatgtgaatgaccaccagatggagtttgcaagaaatgttgctaagagaatggaaaccattattccggttgaggacattagcacacttggtgatgtgattaaaaattatgatgaaattgttgccaagatgggtcatggtatgagtagtaataatgagaagttttgtgaaaaattagagaacattgcaaaagaaatgtttggtaaataaaaatagtcactgtagattaggagctgtttatgggaaaaaatagagttcgtcaattggatttaattagaatgattagtacttggggaatttttacttttcatttttttgtaaacagatcatcattgtttggtgcagtaggaacgcatgggggatatacagggggggatattcgttgctgcattttttgtgctatccggatactgccttatgttaactaataatgagattagacctaattattttgtaaagagagcattgacaatatacccagcattttggattgcatatctgttctattatatgcaaagagtattttatacaggaagttttttctggaatccttcggttgaaaatatttccattgttgaatcagttgtagggatagatgggttattagcaattcatggttttaaaaactattatctagttggtgaatggtttctcggtgtaatattgtgcttgtatttattatatccacttctgctgaaattaattaagaaatcaaaattaatctttgcaatagttatttatggtttgtatacagtgacaatgttgatttatagaattaatcccaattattttaaggttggagcagactataatttattaacatgtatgtgttgttttggtacaggaatgttattaaagcatgttttagaactatataataagtacttttggatatttgtgagtgccattgttattttggcgggtctttttgtacctaatggaacaatatgtaacaatatgtaacatttgcttgggtgtaggaatttctgtttcgatttattttatctcaaaacctcttttgaagagtgatgaaatatataaaatagttagatttttttcggatatttcttttccgttctttttaatacatcacatgatgattgagaataattctgcgatatatgaaaagaaccagttagtagcatatgtgtttgttcttacaataacaatcgtatatgcatggtgtttgttacaagcagcagctgggttaacaaaaaaactgagcaatatttgtaatagaaaataaggaaaggtatagatattgtatggcagacaatacaagaatcgcagcaggaattgtattatttaatcctgacgatgaaaatagatttatttactgcttaaataaattggcagaacagtttgacaaaatatatatttttaataatggccatccatattcttttgatatgtttagctcagtggaatacatatctgaaaatgaaaacaaaggaattgcctacgctctaaacgaaataatggcatgtgcgaaaaaagatgggtattcttgggtggtgacaatggatcaggattcggttattccggatggattggtagatggatatgcgaaacacattaagaaaaattcaaatattggtattatttgtccgcaggttacagataagcgaagaatttattcagttgcggaaaaagataatggagaagtgtatgttgatttttgcataacgtctgcagcttgcacatctgttgaagcatgggaaaaatgcggaaaattcgacgaatggctatttatagatcttgtagataatgatttttgcaaaagacttactttaagcggttataaaatattaaaacttaatcaatgggtgctggatcaggaattcgggaaaatcattccgaaaagcaaacacacacaggagttttggcttaaagttagtaagattttgcataatcaaaattttgctaagttctcttataaaaagtttgtgagtcctctgagggtttactatacaaacagaaatatcatatatgtaaataaaaaattaaaaaaatatggctcagtaggttatgaaaactataattgcaaaggctatattggctttattatttcatttatgataccaagcattctaagggctggtggaaaaatagatgtattaagagctacagttaaaggcgttaaagatggtatggcggcgacaccaagtgaatggtcagttaacgaaaaagatatggtggagtaatggaagaaatatatgcaggaatagttacgttcaatccaaatattgaacgtctaaaagaaaatgttagtgcaatatgtatccaagttcctgaggtcgtaattttcgataatggatcaagtaattttgcagatatacaggagtgcatatcggtatttcataatgcgattttaattcattcagatgaaaatataggtatagctgcggcactgaatcgactaatgcaatggggatccaataataattatgactggatgcttagtttggatcaagattctgtatgtgatgcatcatatgtcaataaaatgaaacagtatttagatgtagagcctttactagggattgttgcacctgttattgttgacagaaatgtcggagtagttggtcataatcccaataaagaatattgtcatgttaatacttgcattacgtcaggtgcattttcaaaaattgagtattggaaacaaatcggtgaatatgatgaaagcatgtttatagattcagtcgattttgaatattgttaccgcatgcgaaaaaatgggtatggggtaattcaagtaaaagacgttcatcttttgcatgagttgggaaatagtgttaaacgtcgatttttattttggaagatagatgttacaggacattctgcatttagaaaatattatattgccaggaataatgtatattatccgaaaaaacatcatttatggattcgctttatacgaggaaattatcgaaatttaaagatgattgttattgttcttttgtatgaagataataagaaagaaaaaatacgttcaattttatcaggatggaaaaatgcgtattgagaaaggaaaaatgatttcataatcatatggtaagaaaatgcttatagattttattttgcctccgataggatcatcaggaggaattgatgtggtatataaatatgctgatttgcttataaaaagaggccatgatgttcgagtgtataaagaaattaaagcaagtaatatgcatcgatataaaagtgcctttgtaaatggaatacatcaagcttattgtacagtaaaagcaatttttaattataagaaatatagcaataagatagatcattttgtttggaaaattacagataaatctattcgagatgctgatgtaattattgctacggcttggccaacagcctataaggcagatcggttatcgcctgaaaaaggggaaaaattctattttattcaggactttgaaatatgggataatgaagaaattgtaaaaaagtcatatgagttaccattaaataaaattgttgtttcgtcttggattaatcaaaagttgaaacagaatctggggataggaccatacccagttgtttacaacggtttagatacagagatatatcatcatgtaaatattgataaagatactaatagcatatgttttttaatgctaaatcatacattacccaaaaagggggttgctgaaggaattaaagtatttgaaaaaatcagagaaaaatatcctaacagcaaattgagaatgttcggattttgcgatagttcaaatgttccatcttatgttgaatatcgtcagaatccaacaaaagcagaactggttaaaatgtattcagagtcagatatttttattttcccgagtttagaggaaggctgggggcttactcctttggaagcaatggcttgtggctgttttgttgtgggaactaatgtgggcttcgtacaagatattggagttcataaaggaaatatgatgatttcagagcccggaaacattgaacagatgattcaaaatatagaagaacttatagttgataaagcattacaaaaaagtattcaaaatgaaatgaaaaatgtaattataacattagattgggaaaagtctgtggaaaaattagaaaagatattttctcaacaagagggttaagatgattgttggatgtattacaatattgctatttttgatgagtatattttcaaaaaagaataaagctctgtacatggttctatttatttggatgtggattttaatggcatttaccaccggaattgcagatgaacaggaagtatacatgagtaggtatgcttccccagaattatgggcgggaaatagtgaaattttatacaatgcaattattttgctattccgaaaggtggggtgtacgttttatcaatacaaggccataattacttttattcagctactactaatttttacaacagtttggaaactttcaaagtatccgaatatagtatgttgtttgtacatgatatatccatttcctttaaatattgctcagatgcgtcatgctttggcaacggccatatttgtttttgcaattcgttatctatttgaggacgacaagattttgataaaaattaacaaatttaagctatcacgaagtgattttaaatatatttgtttgattttgattgcagcgtgcatacattctgccagcttgatttggcttgttttgctagtggctaaaaaatttgatctcaaaacgaatattgtttttacagcattttttaacttcctaatagtatttttactttcgccccaaagtattatgagaatacttgaagtatttggtgcaggcggtcgaatgggagcttatttttctgctgaatatcaatcatctacttggagacattatggtggtgcattattaaatgttacatttacagcagcattgcttattttcttatgtttttacatactaaataaaaaatccggctatgttaataaaagccaagttatgctcgcaatgaaagctaacattagtattctttgcatatatggactgattataaaatatacaggtgaggtttatagattacaagagtcaatgactattatgaacttaattattttgtttaatgcattaaaatcagatggtttatctaaaagaaaaatatcaaaaaataatgcgttagtatttatgggtgtgtttgtgttcatactgggaatagcgtacatttctgttggtatgcatttgattcctacgattttaaaacccatcttacaaaataatatacttataaatagcattttctagcgaacttacgaactaaaggaatttgacgatgagaattttagttacaggattatgtggaaactatggaggagtagaatcattcttctatggatattttaatgaaataattaaaattgataaagatattacatttgatgttttaggatataaagatgttgttgatgcagacagagttatcgcagctggtggtaatgtttttacggtgagtagtttttctaagaacgaaattaagaattttatggaaaaacatgcccctgattatgatgtgctatgggggttggctgtagatttgagtacgattaatattattaagtatgcaaaaatttacggtataaaaaaaataattttacatagtcactgctcttctatgatgggaacgggagccaataaaataaaaaaaacttttttccactatattcataggatagagataaagaaatatgttacagattattgggcgtgttcagattttgctgctaaatggatgtttccgaaaaatgttgtaaaaaataaagtggtatatattcctaatgcaatcgatggcaataagtacaaatttaatgaagaactaagaaacaaaaaaagacgtgaaatcggctgtaacgaaactttggcaataggatttattggaaggttaagccctgaaaaaaatccaatattttcaataaaagtatgtgaagaaatcaacaagcaaaaagattgcatactttatattatcggaaaaggaccgcttgaaaatcaactaaaggaagctattaaaaatcatgatttagaaactcatgtgaaattattaggactcagaaatgatgtaaatgaattaatgcaagcattagattatgcaattattccatcatattttgaaggtatgcctatggtggctattgaggcacaaacatcaggactgccgttagttgctgcatcagaaggaataacaaaacagatatgtgtattagatacaacaaagatgatacgactggctgatggagcgaaaacttgggcagaaacaatagtgaatataaaagcggaagaacgagaaaaggcatatgcgattatgtccgaaaatggttttaatttgcctgaggcagcaattcaattatgcaaattattaaaacagatgttactataagaggattgaaggtatggcgaagattcatgttcagtattattatttgggatttaggaaaaaaagtgatccggatgatttcttttacctaacagataattataattttaaggaaatcgaatttccttttggaaaaagatattgggctgcagatccatttattgtagaaaatggtgaggatgtatatattttttatgaatattttgatgaatttagaggtaagggatcgattgcttgtagcaaagtcgtagataatgttgcaagtaaaccagtcatcattatcgatgaggcatttcatttatcatttccaatgatttttgagaataaaaatcgtttatatatgataccagagagtgaggcatcaaatagtgttattttgtataaatgtatttcgttcccatacaaatgggaaaaagataaagtgattttaaataatgtgaaggcatgtgatagtgttgttttacaaaatgacgtaggaaagtatctgtttataacctcactaatggatgagaaaagtaccaacgaaagaaaaaatttctgttatgtgcataatgtgatgtatgagttagatgaagaacttaatattattcccgatagcaaaaggaaactatcagaaggcgattatggtatacgcaatgcaggtaaagtaattaaaactaaaagtaatataatccgtatagctcaaaattgtacagaaggtatgtatgggaaaggtcttgtcttttgggcgttggattcatacaatccttacaaagaacatgagttagcaaatatagattatgaaaaagcatctaatcatataacgcatattgaccataatggaaaaatagagggaatacacacatacaactgttctgctcattacgaaatcatagattttatgatttttaatgaacttcctgtttactataaattatattattttcttgggaataggattttcaaaataattacgaaaattgaaaggtttataagaagctaaaatggttatctacaataaaataaaaaaaaatataaaggaaaaaactttttggcccaaattgcatgacaagtgtttctttttgattcaaccgattttttcttgcattttccgtcaattgccaatagataattctaaaattacgtttgatagttttgagggaactggatttggtggtgatcctaaatttatatgtgaggaattgttgcaaagaaaactcaatctgaaaattatttggtttgtaaggaagtatcatgacaattttccggacggggttacacaggttaaaatcaattctatcagggctatatatcatcaatccacggccaaagtatgggtagataataccagaactggacataggacaaaaaaaagaccgaatcaaaaatatatgcaaacgtggcatggaaatctccttgggaaaaagtgtgaaaaagatgcagaagataagctgtggcctgggtatattccggttgctcaatatgatggtatgatcacaaacgcatttatagttgcaaataggcaaagcttggatttggccaaaagatcattttggcttaatgataaagtggaatatttaaaaataggagctccatcaatagatcctttgttttgtgtaaaaaatgacgattcaataaagaaaaaagttaaacaaaaatttggaatatcagatgaaacctatattattttgtatgctccatcgtttagagatgatggctctcttgatggatataaattggatttccagaaattgatacatgcatttgaacataacactcgacgaaaatgtgttatgttaataagatttcacccagatgttgtacaacatgaaaaatcatttgcttttacagataatttaataaatgctactcgatatgaagatcttaaagagttatcgctaactgcggattgcttaataacggattattcctctgtcgcatatgattttctgatattaagaaaacctatttttcgtatctgcttagattttgagaagtataagcaactaagagacgtatatgatgaattttatcagctcccatatggcatttgtctgtcaaatgagcaagcaattgagaccgtaaatcattttagcaataaagaataccagattaaattggatgagtactttaaaataaacactatatatgataatggtacggcatcaaaacatgcagctgactggatttgctctcaattgggtatagatggtgaattttaatcggaattatggaggaaaagatttgatttatgcgtaacaatagcattattagtggtgtgttttggacaatgggtgaaagatgcatagctcaaatagtttctttcatagtttcaattgtcttggcaaggttattgtcaccaacagattatggtgtggtagctattttactaatatttataagtatagcagatgtttttgtttcaaatggttttggagcagcgttaattcaaaagaaggatgcagatcagttggatttttcgacactattgatatgtagtgtaatatcttcaatagtaatttattttataatttatttttcagcaccgattattgcaaatttttataataatgaaaatatcgtgccattgatgcgtgttatggcattgagaattcctataagcggatacaatacgattcagcgtgcgtatatttcaagaaacatgatgtttaaaaagtttttcttttctacgcttggaggtacagtagtttcagcaattataggtattacaatggcgtataagggttttggagcatgggcattagttgcacaaaatcttggcaatactattgtagacacgattgttttatcgataacaattgattggaagccgtctcttaggtttaagttagaacgtgcaataagcttaatgtcatatggctggaaagttttatgcacaagtgtaataggaaccttctttgaccaattgcaatcattggtaataggaaaagcattttcatctgcagatttagcctactataacaaaggaaatcaaataccatctttgttttctacgaatgtaaataattcagtaatgactgttttgtttccagcatttgcaaattatagcgatgattacgattcgattagaaatataacgagaaaagcaattcgtatgatgacatacatttccttccctttaatgataggattagctatgacagcaaaacctttaattattttactccttacggaaaaatgggaaccttctatcgactatatgaaaatactaagtatttctgtggcgttcggcttgataggtgatactgggcttcaaactatcaaggcaattggaaggagcgatgtattattgaaattggagtttgtgaaaaaaccagtgtttttaattcttttagttctgggattaaactatggaactatgggtgttgctgtaacaaccgcaatttattctttctatgcaatgcttatgaattttggaacgatgggaaagcttataaattattgttttagcgatcaagttaaagatgtgttgagtgttgcaattctgtcattgataatgggagttgcagtttatatttgtggcttaatgacgtttaataattatgttttagaaatagtaatcaaggcttgtgtaggagtagcggtttatatattgatttcattaattactagaagccaagaatttatctatttagtaagttttgctaagaagaaatttattaaataattagagatatgtaacagtaaaatagaacaactaaatgaagatgcgaggtaagttctttttatgaaaaatgaattgcgtatagcacagttttttaaatatatattttttcttgttctatttttacaagttacatatatgtataaaaaaccaatacttatattagttggtcttgtagaattaactttaattctacttgcaagcggatatttagtttccattaacaaaatattgggatatttaataaactgtattttacttttaatcattggaattgagattatagtatatcgtttcgcgggaaactttgtctcattgataatggtgactaacttagagtcgatacagggaattagtggaaaagctatactgtatttgttatatattattcctttcctagtcgcactgtgcattccaactcctaaaatagaggggaggttttataagtcgttttctaaatgtggtttagtatgtgttttactactcatagagtttataatatggaattccggagaaaatgtttcacctattgaaaatagtattttactatttagaaatatctatgcaagacaagcaaggtacaataaaattgcacaaagtggtaactctgattttgagatgttagattcgatgttttataaggatataattggaaattatgtatcatctccgttacaaaagaaaaatccagatgttgtgctcatttttacagaaggattatctcaaaatattatagatgatgaaagaaatataatgcctaatgttcgtatgtacgaagataagtcatttaattttacaaactattataatcacacggcagcaacctataggggactcattggacaattatattcagggcatcaatataataacaatgatgaaaatactttgatttcgcttcagaaaataatgcatgataatggctatcaaacaacgctgattaatacggaaccaaacaatcaggattttacaaattatttaaaaacatttgatttcgatagaattgttacctcaaataatacagacacatggttaagagatgatgaggcgtatgaattgcttggaaatgaagtgaaagagtgttatgaaaatagcaagccagattttattgttatatatacgtttggtacacatgcaacttttgatgaatcgaatgttaaatatggagatgggaaaaacggtcttttaaatagattcgcaaatgcagactactatttcggcgaatttatgaggaattttgaaaacaatgaaaaatatagtgatttagtggttgtttttactacggatcattgtacatatgaagatgaagattttattaggacgtttgagccaagctatgcaagagaggactatttttgtgatcaaatccctttattgatttggaataataaaattgaagcacaagaaattaatgccgaaggaagaaatagcttatgctttgcaccaacattattggattttcttgacattgacggggataactattttttagggaactcccttttctcaaataatgatgtaaataacttaattgataaggtatacgcaatacctgatgaggaacgttatcgcattacaagtgaaagcggtatatctgaattagatgaggcagaatttaatatggtaaatccaataataaagggctatttgtcatatacaataaaagcaaaagaaatagtttattgactgcatattaataattgaagggagaagatgaaatgaacattgctgttatttttgcaggaggcgttggaagtcgaatgcatagtaaagaaagaccaaaacagtttttagaaatgtataataaaccaattattattcatacactggaacattttgaaaagcataaagacattgatgcaattgtagttgtgtgtattaatggctggattcagtatttaaaagatttgttatatagatttagaatcgaaaaagtgaaattagttgttccgggtggtacaacagggcagttgtctatttacaatggattgaaagcggcaaaagagatagccggaaatgaaaaaagtattgtccttatacatgatggcgttcgtcctttgattaacgaaaaagtaatatctgataatattcaaagtgttttgaattacggatcagcaattacaacagcaaaagtaaaagagacaattcttgttgtaaatgaagatgattctaccattgactatgtgcctagtcgaaataattcgagagtagcaaaagcacctcaaagtttttggcttgacgatatactggcagcccatgaaaaatcactatctgatggtgaaaataattgtattgattcatgtactatgatgcaaaaatatggatttaatcttcatctaatagatggtcctggagaaaatattaaaattacaacaccggaagatttttataccatgcgagcaattctggaggcaaaggagaatgagcaaatctatggattggacgaataattggagtgtgtttagcaaagagcgtagtgctttatacggaatatcaattttatcgattataattttccattattttgaggacctaatgcttctgatttttcgggggaatggggaggactttaggtatgatgtcttatgaattatattttgtgcatatcagtaagtatcattctatcagtttggataaaaaaattacaggggaggatagcctatgtcaacgaatattttaaaagatgatttggaatatatttcaaattacaatcttccatatgaaaatcttaaaggacatacggttttggtaaccggtgcaacgggtcttattggctttcatttaattaaagcatttcttactatcggagacattaaaattattgccttaattcgtaatataaacaaggcaaaagaaatttatacaaaagaagaaatgcaacacatctcatttgtaattggagatattgttgaaaaaataaatatagatgtgcagatagattacatatttcattgtgccgcagttacaacttcaaaaaccatgattaataatccggtggaaacaattattacttctgtaaacggaacaaacaatattttgaaactagctgcagagaagaaatcaaaatcggttgtatttatctcatcaatggaaatgtatggctcatttgatggcgatgcaggtgaagtaaccgagggaaaaattggatatattgatccattaaaagtaagaagtaattacccggagagtaaacgtctttgtgaaaatatgtgtatagcttatttacacgaatacaatgttccggtaaaaattgcaagattggctcaaacttttggggcaggggtacttccttgggaaaatcgcgtgtttgcacaattcgctcatagtgcaatgaatgaaacggatatagtattacatacaaaaggtttgtcagaaggaaattattgctatacaagtgattgcatcaccggattacttacaattcttctaaatggagagaacggagaagcttataatatttcaaaccctaaaagtcatactactattgctaatatggcgttaatggttgctgaaaaaatcgcagataataaaatcaaggtgatttatgatataccggaaacgaatacttttggctatgctgctgatacaaaaatgaaattgaattctgataaattgcaaaaactaggttggaaacctcaagtcgatttagaagaagcatataaaagaatgattgagcagatgaaatttgaatcagaaaataccgaattataaaaaatataggtggtgagtcgtttggaaaagaaatatcagttttttatttcatcaacatatgaagatttaaaagaagaacgcaacaaagctattcaagcgattctgaccatgaatcaatttccgattggcatggagatgttcagtgctgcagatgatgatcaatggaaaattatcaaagaagcgattgactcgtccgatttttatattcttattatcggaaatagatatagatgtgccatattttagtaacattgatatattaagtggaaaaaatgttaattggacaattgtatggtttgattccactaaaaaggatatgatgagacagagccttatagatgcaggtattgatggggataggatacaacttaagcctgcgaatgagttttatgatttgtaggataaagaaacgattaaaaaagatggaagacataatggagaaagttatgtttatcaataaaaactgtagtaattacaaataaagaatattgtagtagaaagaagaaatcatgtcaaaatactttggaacagatggcttccgcggcgaggccaataaaatattaaaagcagatgatgcatacaagatcggacgatacttaggctggtattacagcagagaacacagagggcgtatcgtcattggaaaagatacaagaagaagcagctatatgtttgaatacgctttagttgccggaattactgcatccggatcagatgcatttcttctacacgtaacgacaacaccaagtgttgcctatgttgtccggacagaagattttgattgtggaatcatggtatcagccagtcacaacccatattatgataatggtatcaagatcatagacggaaatggacacaagattgcttccgatatcgaagaagcaatggaaaattacatagatggcatcggagaagaacttccatttgcaacaggagaggcagtaggaactgcaacagactatgcaatcggaagaaaccgctatatcggatatcttatttcactggcaacaagatcatataagaatatgagagttggcttagactgctccaacggaagtacttcatccatagcaaagagtgtattcgatgcacttggagccaaaacatatgtgatcgccaatgagccgaacggattgaacatcaacaaagactgcggttccacacacattgaaaatcttcagaagtttgttttggagaataaacttgacgttggttttgcatttgatggagatgcagaccgctgtatcgcagtggatgagaccggaatggaagtccatggagattatattttatatgtctgtggaaagtatctgaaagaaaatggcagattggaaggcaacacagtagtcgcaactatcatgtccaatctcggattattcaaggctttagagaaatccggcattgactatctgaaaaccacagtcggggacaagtatgtgaatgaagctatggttgagcatggctatgtacttggtggtgagcagagtggacacattattttcagcaaacatgcaacgaccggtgatggaatgctcacagcgatcatgctcatggaagtgatcctggagaagaagcagagccttcatgctttatgtgaaggaatgaagatgtatccgcagtatcttgagaatgtgagagtttctgataagaaggcagtgacagagaatccggctgtgcagaagaaaaagcaggagatagaagaagaactggctggaaacggacgcatcattttacgagagagcggcactgagccggtgatccgtgtgatggcggaggctgattcggatgaactttgcaggaagtatgttggggagatggttaaggttattaatagtattttgtaagagaatagaatatgagatgaatatgaagttcctgagaggggactttgtatttgcaggaacaaactacaagtgaagatgcacaagagaaaatatttgcttataatgttttgcagtgataaacttaaaataaattaaatgttaatgaggcatgaaaaaaggggggctaccttttaccctttaaggcataaaaggaagaacaatagatgttgaaagtaaaaagagtaaacaaaagtaatctattatatggtatggtttggtttgtaatactattactcgcagatatttataatatttttacacgaattatatgtagtataggagcatatgagttctttacgattgttattgtgactgcggcaattgtaactatatactttagaatcgatatttctatcaaaatgccaatcaattcagatatggacgaagcgataaaaagtgctgggtatactttagcaatatatttactttttcagatgatagcattaactatgcagataaaaatttttgcatggtataagcttataggaacagttatatgcctgttatttcttgctatagtgtatacatatcgaataagaattttagaaaaaagcagtgataaatatagagaaaccagagagataaagaataataccgttacattacaagaactatatagagaacaaatggataaacaaagtgatacaatgattttattagatgaagatgctgtagattatgacttgctgcacagaaaagagcttattgaaagcatttctacaacaataaaaaattgttatccaaacaagaaatttgtccttagcttaagtggaaattggggaagtggaaaaacaaccatattaaatctggtaaaaaagcaattgcaggattgtcaggagaacataataattatagacgattttgatccatggaattttgaagatgaagcagctttattgggagctattctggatacaatttttcaaaaaatgaatcttaattatagtatttcgaaacaaagagcatggaaaaaagatctgatcgcacttatttttaatataaatgcagcaacaaggggagtaaaattttctttttttaaggaaaatataaattcagtctcgaaaatcagaaatcagatcaatgaatatatgtcattttcagatcagagattagtatttattttggataatatcgaacgcttgggatctgaaagaatgctgtttttattgaaaacagttgccgatgtacttaatctggacagagtgacttatatactttcctatgatccgagaatcatggaacgattgctcgctgaacagaagtatgacatggagtatctgaaaaagattgttcagatggaattctgtgttccggaattggatacagatctgaaaaatgatttaatgtttcactgtgtttctaatatgctgaaaatataccggattgaagatgaaaaaagaaatgaaattttaaacattgttcccttattaacggattatactcaggatgtgagagatataaaacgatttttaaactcgatcatgagtgtcctgtattatttttcaaatgaacaaaacaagcggcttgcaatgcagctgaatatttgtgattatatcattattgaattaataaagagggaaaatagagagttatattcaataatttggaaaaatgctacgcattttgtatctgctgacagagaaacaatgtttggatttgaagactatttacaagtaaaccaggagaagaaaaatgcagagataatagatttttataaaaagatatttagctcagaaaaaaatagtcgatatttgaatttgctaaagagaatattcccatatgtgaatcattatgtcatggagaggaacaacataataaacaaggattacacagatgaaaaatatgagcagacaataaaaaaacacaggatttatagcggtaattattttccgatatattttacgctgcacagtaatgaacatcttgagattcagaacatagtagagaaaatgattgggctttgcaatgcaaataacagggaagaagcaaagcaagagctgaaggtggctcttagggaatttaatgcaattgagtataaaataatggaagaaattcagttatacacaaatgatctgacacagcagggatgggaagttttatttgatcttttatacgattatacacaggtagcggatgattcaatgatgtttcttagactgaatgcaaaaagacgtgctatttatatcctttctcttgcagtggagaatgtatcagaacaattttttgataattttttactgtgtatgcagaaagaatataatagaatgaatacgatccactcaattatatggcataatagaatagagaacgacaccaatgaaggaaataaagaagtctgttttgaaggacggaatgaaaatatttatgagacattgaagatgatggctgtatatattatagagcataaaatagatctatatacagatccttattatagtgtacataatatatggggatggtatcattctgtgaaggataatagtgagataaatgtaaaagaagcttttcactatatgttgacatccaaaaatatttttcggtttttgtgggatatgacaagcgaatttctgagcggagtttatggatacaaacttaatagaaataattttgaggctttctgttcatttgatgagattgaaaattatatggcggattgttgcccgacaacggcagatgaaaaatttgttgctgaaatataccaagcatataaaaatgggacaaatgattcagagagagaagtatatagaggagaagagatgaaagttaaattatagaaatcaatataaatgattaacgttgatatatggattacagataggtataacagatggaactataaaatcagacagaatttgaagaatggagaacgaagtggaatgataaattattgcaggcaggaaagattagaaatgatcttttgagtgaaagaagattttatggattgtggaattgtaagctatgtggctggaacaacaccaatcagtaatgatacggttgccggtattttagcagaaaattttgtttatagtgaattatatcgattatataagaaatacaacttgaaaggaaataagccttgctgttttatttatgacaattatgaattggattttatgcttgttaacaggaacgatagaaaatatggaataaaagtaaaatctaataagtctaataaaacaaagtcgttgaaaacatataagaacagagcattcacatattcaagtcagccaagagttggataatcttaagaatatatgaatgccacacaatatctctttgcacaactatagttctatgctataatacctcttagtgaaaaatcaaaggatgagaggataatcatgaacgaagaagaggtacagattgatttaatgacattactgcattatatattacgcaaatggcgtagcattatcgtaatgatgctgattcttgcagtggcagccaacctatattctgtgaagaagagcatggcagaagtggcagcagcaggcgaagtgcaggagaagagtacagagaaagcagttgaggagatcaagacagctttaacagatgatgagattgagcaggtagagcttgcttatagaatgtattcctttaatgcagagatatatcgtgataatgaacaatatcttgagaattctgcagtgatgcagctgagtccgaatgagatcccgacagagatgctgagttatcaggtgaagaaagatgctgcggaagaagaactggtcaatatttttgcaatgtatgagaatgcattactggatgaggacacatgtaaagcagttgcagcagtcttcggagaaaaatatgcgaatacatctgtaagagaactgatcaaaattgaggacaccctgaacgtattacatacagatgtggtgatgacgcaaagtatgaattccggaatactgaatattcggatttatgcaacagaccaggagcagtgtgagcagatcgctgagattattaaagatcgtatgcaggtttacacgcaacagttacagcagacttttggacagtttattgtgaattcagttgcagagcaatactatatgtcaagcgatagtgagattaatgatcagaagtcagatgcaattgatgcggtaagcagtgcatactctgctatgcagaacgcatctgcaggacttacagaagatcagatgacctattataatttgcttgtaaaaccgatcgaagaagagaaggttcaggaaaatgataagggagttgaaacagcaataactccaaccgtacagtatgttaatattaaatatattctgataggacttcttgcaggtatgtttcttgcagtttgttggtatgcggtcatttatattatgacacagactgttaaagatgcggatgaagtgaaggcagttacaaatcttccggtatttggaatggtacttaagaataagcagactgaaaaaggaaataggatagacagatggattgattcatggtttgcacatggaagaaagagtgaggatatggaactcttattaatgcgtatcagccatgaagttgctatgctggcagaacagaagaatatgaaacatctattacttacagtttatgaaagtaacggagaggaaaccagagaatatgcagagaatcttgcagataaactcagtgaacttggaatgacagttacctgcacagatggtctgatctccaataatacagaagtattaaaacagcttgagtatgcagatggagcagtctttgtagagcagttaatgaaatcagatagaaatgagatcaaggacgcagttgagctttgtgagcgttgtaaggtagaagtgcttggtaatgttgttatcggaagtgacttatattagaagacaatacacaaagaggaaaatactttttgcagttggggcagtaaaaagagcctgtgtacacctatgaaaaatattgacaagaatgaacgcacaaattatactgtattcattgaataattaaaagtatgcggatatcggttttggaatgaacaaaaaatcgataccgcatttttgtgtatcaatttcggatataattgttcaatacaacgtaaaaagaaatataaaatgaataaaacaggaataaaaaatatgatagatcagaaacagatacaatcagacaacatgaatataatgcagagttattgatgaaaaaagttattgaaactaataatgaagaggagagaacaaaactcagatcagctgcggaaacatttaagaatttagcaatggaagaatggtgtaacagatgaaatgatgcagattaatagataaatttattagcattagcgtcattctttataacaacattagttgtgaatacaatctcaacagaaaaaatagaaaatattttcacaaaagatattacgatattaagttatgtgtttatggctgtttcttttggatatttattattatgtaattgggagatgaagaagtataatatattctgggcagtatcgatggtagtgattggtattggaattatgatataataaatgaatatcagactggtttgcgaaaaatgccgatgttgagggcttctggaagaagcccttgaatataatacaattgaattacaaatgacgaatactgaaaagatgaaattgcatcatatcgaatggtcttattttacataaaagtgtataattactatttaaaattagtgatagattgctcgcttgatttgaaagtaggttatattgaaggaagaatcaataagataaaatttataaattaggaaggggtaaaatacacaacaaaaggttaagacattgccaatttataatatcagaaagctattgtttttccttttatatgcaaagaaaatggtttacggttcataatgtaataaccaagcaaaagtgaaaaataggaatatacagggtaaatcggtgctacttctgcccagccatatacaagaaaggagaagagtaaaaccaagaagattgtattttgctcactggaagccttataaatggcatatgtaatagctgctacaataatgataaaggcagcacttccccaatgtagtccaatataagaaaacatcatgtcgaggcagtcttcatcctctataggaaatccatagaaaccaacgccaccatttcttagatagaaagtagtggtcaattgaattcttgagagcatggttccgtcatgttgtaaaaataattccggtttgcggatatataaataacttccgataaatggaatacaaacacatagaagaaatgctccggatgtaaatagtaccatcattttatgaaaccagttttttggtatgacaattgacaataagtggatgacaatcagcatagctataacagcttctgcagttctgctgttggctgtcagatccagaaagatgataaaacctgcataaaggatgcagtcataccattttttacattcttttcggaggtacatgatatccattgccaaaagtaaaaaatctaatcccatcatattagcatgagtccaaccgaaaaatgtacgtgttcttccgccaatccatacatttatcttattgatcattaatcccataaaaggtaaggtgagaaacaaggcgctgcgtacaatacggacatacaaatctaattttactattttttttatttcaatatttttggcgcagcagaggaacatcattgtgccgaaaatattgtagaagtcataattgtattgataactcttataacataaatagagcaatacaaaaagaaaaaaccaatccagaacaaaatttttttgaataatgactttggctagcagtaaaatcaacagaatatgataaaaaagtgtaacctgatcccaatattgaggaatagtctggcgcatgaagctgaaaagtgggtaatacattcccaacaaaaaataaagaatgtataaaaagattgtagaaatctcgttgcgctgtttgaatttttctattaatatattcataagtgtaatctccttaatatagtcatatatattgattatatcataagagcttttttatgaaaagaaaatgagaaaggcagattgttgaaaatggggaaaaaactgcttagtattatcattccatgttataacgaagaaaaaacagtagaaaacatatatgttgctattacggatacaatggatatgctgccacaatatgattatgaaatattatatgtaaatgatggctccaaagacaatacattgaacaaattgattggattatcagaaatggatgtgcatgtgaagtattattcattctcaagaaactttggcaaagaggcggcaatttatgcaggtcttacgaatgcaagaggagattatgtagtgacaatggatgcggatatgcaggatcctccggcacttctgccggagatgatccgtatgcttgagtcaggagaatatgacagtgttgcgacaagacgtgtaagccgtaagggtgaaccggtggtacgatctttttgtgccagatgtttttataaattgatacggaggatatccgatgcggatattgtggatggagccagggattttcgaatgatgacgagagatatggtaaacagcgtgcttgctttatcagagtataatcggttttcaaaaggtatttttgggtgggttggttatcggacaaaatggttagagtatgagaatatagaacgttcagccggggagacaaagtggagtttctggaaactttttgtctattctctggacggaattgttaatttttccaatgtaccgctgatgatctcgtcctaccttggaatattgatgacgtttatttcttttgtggcgattatctttattattgtacgaaaacttatttttggagatccggtcagtggatggccatccctagtatgtatcattacgtttgttggtggaattcaattgttttgtatgggaattatggggcagtatatttcaaaaacctatatggaagtgaagaaaagaccacattatattattcagaaaagtaatgacgaagaagtggaaaaaaataagtgagtctgaacatgaatctgtgtttatcaaaacaggagaaaaaagaatggaaaaagtgctgccgatctgaaatctttttcaaatcggcagcacttttttattattctggaagttttaccacaataatgtcatgaattactccaatacagttttttgctggatagacatcgagattctgataagcttcagtctgtttgatagcagcaatctcttcagaacaggcctggtcaagctgaataccgaaacagtaattccacatagcgaaataatggaaatcaaggttcaggaagttatcctgatctacaccaataatgtatggtacagtaccaccaatattggaagaataggtgtggtagcttccaattacggcgaccttggttatttcaggaaattcgtccagattttctatgcggtctaatacgttgctggcaatgctataacttttttcgtagctaagattcatctcattataacaaatattagcatttcggatgttatagaaagaaagataacaaagtataacgattccggcagattttataattttttcaaaacgcgtttttacacagccatgttcaagatagcagagcaataacagataaataaagcaggcacccatctccatcagtgtgtgataccagacatcggatgatacaaaaaataaaaaacatacagtaagaggcaggcagatgatacagagtattccggtaaggcaagcaagtggctgcctatacaatttatttttcaaaatcagatggacagtacagagtagaagcagaacaaatacaatgcggttggcatatccataccagtatacgttgagagcttcattgaaagaaaacaggtgagataactcattataaactttagtaaaagcctgacggtattcccataaggaaagaagatgaatctgtccgattccctgatattcggttaatgtgatatgatagtatgcattaataatagcagaagctattttgtaaaagaggaatcctccaagcaaaagcgggatatacttccagttgttttgcaggaaggacttgaaatctttctgttttataagcagatcacatataaatataacaagcagaacgcagagcatgacgctgatgtaggcctgataagttccaatgcttaatccaatgcagataatacccggaaagataccgtatcgatatcgccaggtcagataaatgccaagaactgccattaaaaacgccatcatgtaaccgtcagcagtgaacataaacgcaaaggatgctgttatggtaggaaaagcaactacaagcagggaaagcaatatgcaagaccaattttcctttaactcgaaaagttcaacaagcagtacgccggcaagactgatatagagcagggacaatgcaccattgacccagggcatatcatatttggaagagattttactgaagaattcaagaaaacatcttccggaagagtaagtagcaccggttccggcaaagttatacatagaatcccaggatggcagaaagttgaaaaaacgataggcatgagttagcattccaccaatccatgtggcgagaaatgtaattttccattgtttttttatatggagtgttcgattgaaaatttttaaagttgtttcgttcataaaagatatccttttctgtgtttaaaaataagagtcaaccattggtattgttgtgtattgataattttgcaaggcattaatctgatcatcaatattacctgtatagttgtataagtggtatacgtttgatccaccggaagagattccatcgtagcgtggaacatctggataagaagcgtcataatcccggatataaagcagacgttcccgttgctgatcgggataaaaatcatgtatactataaccaaattcaccataatctttgccaagtgattgaacgatggttggaacaagttcgtctaaagtaataggggcaccagtaccattaagtgattcgtgggattcctgtttttccttgatgaaaaagattatttgaggatattcaatatccccatgatcagaggtgataataatagttgaattatcgtaaacgcctagtgtttttaattcgttcaaataagcttcaagcatagtgaaaattcctttgacggttgattggcaagtcgcattctgatcatcaaactgacaattttcatcggttgtgaattcatgtgtaccatttaagtgctgtattgtgaaatagttgctggaggagtcaaacgtcagaccgtttttaactaaatgattataaaaatcataatttgtatgtaaaatattgttttgcggataagatacaatagtggtatatgtttcatttgatacgtcaaaaaaggatttgaaatattctggcataaagcgatagcaggacatatagaacattgtcttatacagtttatggtaatcaatgcaaatagaactttgttttgtagttatattactaatttttccgtcaagaagcgacagagaatgattacctgtcagaatagatgtcgttggagtatataaatttactttgtaattggcatcagataaaatagaaaaataatcgtttgtagtagtatttgtccaacaatcttctaaccagtcatcaacagataacgaaggatctaaatcgtttcctgttagtaaatgcggtagtgatggataggttccatggtaattgcagtcggcattattgtaataagtgaaatcatgcagaaaatcctttaaatccggatatttttcaacggcagatgcaaggtaagtgctggaaaaattatccagaataaataaaataatattatcatttgcggatacggtaaattgtttacttccatccaggataagttcatccttgtcatttgcgtatgtaaaagcagatttatctgcggagggaaaaagtgagatatatccaacacattgcattcccagaataacgagagaggatgttaacattacttttttgaagatgttcggttgaaattttgcaaacagtaaagctcccaaaatgatagttgtccagataatggaatttacaattatttttgaaggtgatgcggtgtatgcttctgcacggacacccatttgttccagatgacggtttaaaaacattgtctggatatatcctgcaattccgattccccagaaaacagaaagaatatattttccgagcttgtctggaaagaatgaaataacaagcgtaaaaataaatgatattaagaatgcaaaaatcaaaaatttccatccaaattcctgatagacaaatccaaattctttataattgccaaaaaatatttcagatggccccataacgaagagcgtgaaaaatagaagcaatacaacaatatagtttgaaagaaaatgtaggaaaacgtttttctttgccattagaaagctcctttcgtgcagcatatcacttttagtttgtttcagagagcagattatgagaaacaatatattctccaagatagtcggcaactttggtggcaccgcttatattcaggtgctcaatatccataaaatctgtatcaccgttgagtccgacatcatccatgtgttcaaacaggtcaaggaaagtacagttgttggcagcagcgtattctgacatggcatccgaataatgatactccccctcatatggaacggtataaaagataagacgaatattgttttcattgcagatgctgacaattttatctaacagatcaagtgaattgcgtggcaattctttttgttcaaaagtatctggatctgaaatatgggttggaacaataccatttgagccaagaaatccatttgaatcctgaaactgttcaatgcttgttgtacttttgaaattatacatgttaatattcgcccagttttcgtgaaatgcaaaaagaggaatatagtaggaaaggtagcgatctttgttgttcccaaaacattgtgcaagatattctctttttccatcaaagtcagaaatggctttcgtgtaataaatttcaccgtttagatcgctgtcttcgtgcactttatctacgttgaaggtttcgataagtacgactttaggagactgggttcttaaagcatcctcaaagaacagagtagtcgtattgagaaactgccagttacaaccgtaattatacgcactaaaaccataggaacttgttatttcctgaacatttaatcctttccatacgtgactggaaccgcaggcaagaatgtcgaccgagttttctggtagtgaatgaaatgccttaatggcatgaaaagcatcatctgtaaaattaggttgcaaaagctgtccagtatagaaaacagagacaccaataatagcagcgcagctgacacaatataataattttttcatagttgtcacctctaaaactgaaaataaataaatttggatgcatcataggaagttccgtaaattccgaatatcagaaggaaaacaacggaaaatgctatgatcagaacctgacaccaggcatcctgtctggcgataatttcacggatacatattttcttctgttttaaataatccgttacaaaaagtaacaaaatacataaaagcataaagcagaagtttttggaattcagtccacagttataaagtgatccgtcaaacagaatccatggattatggacatggataatctgtgaaataatcgtgagtgcttctgaaaaactgttggcgcggaaaaatatccaggagaaatcgatcagcacaaaggtcactataatatgaacggctttatgtccgatggaatttcggtttaagtgaaaaagtttcacaagtttatcacgcaaaggctgcagaatctcaccgatgatctggtaaagtccgttcagaccaccccacacggcaaaagagatttttgcaccatgccagagaccgcttacgaggaaaacaatcattttgttcctatatttacgccatttactgcatctgcttccaccgagcggaatgtagaggtagtccctgaaccaggaagtcagggaaatatgccatcttctccagaagtcagcaacagaaactgccagataaggagactggaagttttccattaaccggataccgagaatctgggcagcccccatagcaataatagagtatccggcaaaatcacagtagatctgaatggcaaaaagtgcagtggctacgatcagataccatccaccaaaggtgtgataatcaccgtaaacccagtcaacgaagattgcaatacggtcagctagtacaatttttaagaaaaatccccagagcatcagtaaaagaccgcttttggcttcctcggaattaaacttatgtggtgtggcaagctgttgcagcaggtgactggaacgctcaatcggaccggcgaccagctgcggaaagaatgatacaaaaagtgcatactgaaaaaaattcttttcagcacaggtatctccacggtatacatcgatcgtatatcccagtgcctgaaaggtatagaaagagatgccgacaggaagaagaatatcgacagatggaagattgagctgtatatggaagacggacagtgcatcccctaaaattccgattgcaaaattaatatatttaaaataaaaaagcagggacaggtttaataaaacactaatagctacaactatttttttcttccgcatgataagcggatcagcagatctttgctgtagcgtatccagtgcaagaccgctaaggtatgtcacaatggtagaaaaaagaatgatcagagcatatttggcattccagcacatatagaaatagtagctggcaatcagaagccagtagtttttcagcttttgtggaatcagaaagtatatcaataccacaatcgggaaaaaaattaaaaagtcagatgagttaaatgacataaaaatctccttaagtaatcattagaaataggaatcaattacctgtacaggtgtataatatccattgtcataaagaaagacaaggtctttcagtgtgccataataagtatatacatgataagcattcatgccgccttcggtcacgccatcgaagcgtttgacggcaggatatgcatcgtctcttacgcggatgtaaacgctgcgttccctggactcgtcagcagaaaaatcgtggacactctgaccatatggagtataatcttcacctatagcttccacaatggtaggaacaagatcattcaggctgattggagcattcgttgtctgcatagagtcgtgcgtttcattttttcctttcataaagaaaatcatctgtgaacgtgcttcggaaccatgatcggcggtaatgataatcgttgagttatcataaataccaaggtctttaagctgttgtaagtaggcatcaagcattgtaaaaataccttttacagttgtctcgcaggttgcattgtcagggtcataagcgcagttttcgtcgttaacgaattcatgggtgccgttcagatgctgaatcgtaaaatagttggacgttgaatccaggctcagtccggtatcttgtagtttttcgtaaaaactatagttggaatacatcatttcgttatccgggtaggatacgatcgtggtgtattgtgagttttttacatcaaaaccaggtttgaaatattcaggcaggaaacgatagcaggacatttgcagcatggttttattaagcttttcatagtcaatctctcttgaggaagattcagttcctacattatctattttcccctgaagtaattccagagtatcggttccggtaagaagactggtcacaggagtatatagattcaccttgtaattgtgtttttcaagaagtttatagtatgcgtttgtggagtcgttatcccagcattgctttaaccagtcattcacagaaagatctgtatccagaggattcccggtaagcatatgtgcaagagatggataagtaccccagtaggcacagtcggcgttattataataggtaaaatcagaaagagaatctgtcatatccgggtaggcagcgagcgcctcatcccagaaagtgttggaaaaattatccagaacaaacaggataatatttttgttagaggagagcgtatattgctcggcaccgctcagggagagttctccttcggtgtcattgtaagccattgcagaagcatctgctgtaaaaaataaagatacaaatcctacagactgaattccaagaagaataccgcttgtcacaccgagcagccggatgcagaattctcttttgaaaatacagataagcacagatgcagcaaggataaaaagccagaataaagcattcaggatgacacgtgtggcattggcggtgtatccttcagcagataccccgatctggtcgagatttttattcaggaacatggtctgaatatacccggcaatggtaaaaccccataaaacggagagaatcagtgtacgcggaaattttggaacaatctgtaagatcagggcgataaaaagtgcaagaactacagaaattccaagaaatttccatccaaattccccatagataaaaccaaattcagcataatttccaaaaaaaatttcggatggtccgaaaacgccgaacataaacagtggtaaaaatacgatcaataatgtgaaaaaatagttcttaagaaaagaaccaggtaaaacagctttttttgacatgattttcctctttcctaattaaatgtatttcaattgcaaaattacgaatgcaattatatcatagaaagcagggaaggaatagtattcagttgaaaattcttgaaatacacagggttatcatgtaaaataatatgagttattaactttatatgaggtgaaaaaatgcaaaaaaaagaatatttgaagaaattttttttatgttgggaatctgtctttctatttatctttatgattggaatttttggcccgtccgaagtcttttttggtaattatacagagttgggagttgtatatggggaattcggctggttattttttggggttggatttaccatttccatcgtaattgcattcgttttggcatttttcccagaaatgattcggaagattatattagcagttgtctggggattatctattgccggatatattcaggttatgtttttaaataaagggattgaccagattggtgtgacagcagaggggtatattccagatgccgacagagtaataaagaatgctgttttttggggagttgcaattgcaattacatttgtcatcacatttgtttgcaaaaagaaatggagtaaggtaatacagcttacaacaacagtgcttttattagtccagctggttgcatacggctccttatttctgacaacagatgatggagcttttcattatgctgaaaacgaactttgtttagacatggagcagcagtttacaatctcttccaatgagaatattattgtacttctttttgataatttgccaaatgaatggtttgaggaagcaagagcaacttatccggatatcacaaaagggttagaagatttcacatactataacaatgcagattgcaattattatggaacatatccatcttttattcatattttgacaggaaatccattggatctgagtttgtctgtaaatgattattttaaacaaagttgggacaatgcgagaaccaatgcatattttgatattttacatagtcataattataagatgaatgtgttttcgtatttatcagaagttatgacgggaggtaatagccttgaaattgcggaaggaaaagtggacaatattatagaaaaagatgatgcaagagaaattgataagccacttttatataaaactatgctgaaaatgtcattgtaccgatatatgccggaatattttaaaccaaaatttgatgtacagaatgaacaatatgcaagtattgtatcgtatccgaataatacgatgcagtattcaaatccgaatttctacaatacaatgatggaaaaaggtctgacgattgatgattccagcaattattttgttgtgaatcacttaaatggtggacatgaatttattaatgatgcaaattgtcaatatgcacaggatccagatagagatgatactataaaaggtatttttttgttagcggcagagtatattaaccagattaaggaatcaggctcctatgatgattctacaattattattatgacggatcatggaacaggtagaaatgcccaacctattttctttatgaaagagcctcatgagactcatgatgtaatgcaggaaaataatgcgcctattacatatgaggaacttatgccaacgattgtagagttattaggagaagattattctgtttttggacagagttttcatgagtttaagcaggatgaggtgcgacatcgtgttttctatgatagaacatatgatacggactatccagatgtggaaagatatgatggaatgcagggaggagcaaatatttattataaatatgaatatgatggaaatcttggtgcaatccagtatcaatatgataatgaattacatgaaattttcccaatggtagattcttattattaggatggcaaacttttgataaaacagaggataaagagatgaaaattaaaaataatggcaaatgttttatttcgatgattgcaattattttatatccgagtatgtttatgtattttcagaacacgttggagacacattttatagaaatttttccttccagcaccagaaggcattaaagccagtacaggctattaataatggaaaggtaccaaagaagtgggtgcgggagaaaaaagatggaagatatgaaaaagaatgtaaaagtaaatggaaaaatttttgcactactgtcaattctgttggtaattctatatccgtgtttgttcatgtattttcaaaatgcggatgaggcaaaaatgatagatgcatttccagctgttggaaagtttttggtgctggcaatttttgtatttttgatatgtatattatttatgagaaggattaaaaaagctgcattgctcacagatattgtaatgtttgtctgcattaattttaataccttttttggaaaagcatcacatttaatagggaaaaagatagttttgcttttatgtatggcaatttttgtgctgtgtggatttttaataaagaagagaggcaaaaatgaggggaaagtatgcttgatacttggaatgtgctttggcatactgattgcggttaatctggtaactgctatccctgatattgtgtcaaaaatcacatatacgaaaacggaagaagatacattagcggctgaatttacggaagaaaagccaaatgtatattatttcatatatgatgaatatgctggacagcagggactacaacgttattatggatacgataatcaggaattcttaggagagttggctgatcttgggtttaatatttctaatacaagccataatacggaatcttattcaacaactgttaatgtgccaaatcttttgaatatttcttatgtggcaagtgcagatgagatagaagcaaataatttaaaatacatgaaaaatccgaagctgataaatatctttaaaagaaatgggtatagtataaatctgattaatcatacagattttttggatggtacagattgcaatgtactggtaacatcaggacatattgatacaatttcaacatatatcatccaaaagagtattatacaggtattagaggattattatgctgagtttatgaaagatgacagcgagataggacagtatgtgtcttcacttaaaaatattttgggtacgatgaaaatatgtgggacacttacagaagatgataaacctacgcttacagtaggatacatctcatgtccacatgtaccgtttgtgtttgatgaaaaaggaaatgcgatagaccaaagtgagatacataactgggaaaataaaaattactatttgaatcagttggaatatatgaatacatgtattctggaaacagtaaataatattttagaagaagatagagaagcaattattattttacaatcagatcatggtgttcgttacccggttcatatggaagaattgggaataaatacagaatatgaaatagatagtgaaattccttatatggaaaatatacttaattgtgtgtactataagggtaagaaaattaatatcgaaggaaaaacgggtattaatacactgcgaactgtcttaaatgaggcgtttaaaacaagttatgatatgattgaaaattagaaagtgatacataggagaagagatgctgtttaattcatatagttttttaatgttttttccagtagttgtagtaatttactttttattaccgaaaaaagtaagatatttatggctgctggctgcaagctattatttttacatgggctggaatgcaaaatatgccttattgctgcttctgtcaacaacaatcacttatctgagtggtgtactactgaaatggctgaaagagaacagaccggatcatataagagcaaagaaatgggtagttgcaggcagctttgtatccaatctggcaattctatttttctttaaatattttaattttacaattgaaagtgtgaatgctattttgaaacatacgagtttgccaacagtgaatacttcattggatgtattgcttccggtcggaatatccttctacacctttcaggcattgggatatactgtagatgtctatcgtggagagattgaagcagaacgaaattttttccggtatgcattatttgtatccttttttccacagcttgtggcgggaccaatcgagcggtcgaaaaatcttctgaatcagctcagacatccgaaagcatttgattacaggcgaatgtctgatggattattgctcatgatctggggatattttctgaagcttgtgattgcagaccggatttctatttttgtggacaatgtatatgccaatgtggggatatacgatggaaagtacctgctgcttgcaagcgtgctgtttgcttttcagatttactgtgatttcgcaggttattccacaattgcaattggagcagccgaggtgatgggatttcaactaatggataattttaacagtccatatttatcccagtctgtcgcagagttttggagaagatggcatatttctctttcttcctggtttaaggattatctttatattcctttgggaggaagtcggaagggaaaagttagaaaatatatcaacataatgatcgtatttctggtgagtggactttggcatggagcaaattggtcatatgttgtctggggaggattaaatggaatctatcaggtagtaggagcaatttttacacctgtcagaaacagaatcaaggaaaaattacatctaaaaaagagcccacttccattggtgatcatttatgtgatagtaacctttatacttgtagattttacatggattttcttccgggcagataacgtgcagcatgcatttgcagtgatcgatagtattttcaatatgaataatcaggcattgttggaaaatggaacactttatgatttgggactaagcagaccaaattttatagttcttggtgcttctttggtgatattattagcaacagatatatgcaaatatcgtggaatcaaggttcgaagcgtgattttaaattttaatattgttataagatgggctgttattattgcaggaattctaggtattttggtgtttggaatctggggaagcggatattctgcaactaattttatttattttcagttttaagtccgtaggagtttgaaaaacaaaagatatctgagagaggtaagatgaaaactattaattattttatgaaaatcacaatctttctgatgattttgattggtggaataattttgataacatatgtgcttacacctgaaataccatcgttttacaaagaaaatcattatgatgtcgttttttttggaacaagtcagtcatactgttcttttgatcctttggttttcgatgaatataatttaaaaacatataatcgtggcagacagcagcagacgatgaattatacttattattatatcaaagatgcattggatgtatgtgatattgatgttgtagttcttgaaatttttgggatgtgttatgaggaagatgatacggggtttataagtgaaggtgtaagagattcgtcactgaatgatatgagaatgtcggaaactaagatagaggcaatcagagagtgtgttccagaagaaatgcaaataagttatttttttccattggataaatatcactccagatgggaggaattagattatgcttcctggaatggattttataacagtgcattaaagccatattatgaggaagcagatcggggatataagcgttggacagaatcggaagtatgtgtggatgattattggagtattgctttttcagaaattcgaagagatgtgtatgcagagaatatcaagtatttagataaaatctatgaactgtgtcagaaaaaaggagcaaaattgatattagttaaagcaccattgccatgttatgacagagtgattgaagaaacgaatactgtttcagactgggcggaagaacatgatatagaattaatcaattatatgagattacaggatgttcttgaactgaatttttatacagacagtctggatggcggaactcatctgaatgaaagtggtgctggaaaggtatcaaagcatcttgcagcatatttaaaagaaaattattttgaatgatagtttgatttaggactaaagtgaaagaatagtttgtggggatacaaatgaaaaaattaattagtttgatgaaagtacttattttttgtggaattttggctggaagtatttgtggaattacgatagcattgcttccaagaataccggacttttacaaggaagaacattgggacgcagtgttttttggaacgagtcagagctattgcacctttgacccggaaatatttgatgagtatggtttgaaaacctataatcgtggcaggcagcagcagacaatgaattatacatattattatgtcaaggatgcgctggataaaagtgatattgatgtggttgtgttagagatatttggaatgttttatgatgaggatgatactgggtttacgagcgagggagtgagagattcctcattaaatgacctacgatattcagatataaaagtggaagcaataagagattgtgtgccggaagatttacaattgtcttatcttttccctcttgacaagtatcattccagatgggaagacttggattattcgtcttttgaagggtggaaagagagctttatgaattcatattttacagaagagggacgaggattcaaacattgggcaggagcgcagccgtgcggatatgcgtcatgggatactattttttcggagcagagaagagaagtatatgagaaaaactttgaatatctggataaaatttatgaattatgcaaagagaagggagcagaactggttctggtgaaggctccatttccgtgttatgacagaacggttgagatgacaaatacagttatggactgggcagatgaaaatggtgtggaattgattaattgcatgaaggtgacagatgtgatcggcatgaattttgaggaagatagtctggatggtggaacacatttgaatgagagtggtggacagaaagtatccagatatattgcggagtatttaaaggaaaatgtattgaaataaaattcaattatagaaaaatgatacactagatggatatttatgcaagctggagaattagataaattactgaaaagtgttctgatttatatatgtaacattgacaacaatgaatgctagtactatacttcaacaagatttatgtatttaggagaaaaagtatgatcacaaaaagagaatttgatacgttggtacttctgacagagacaaaagaggttgtatctcagaaagatatggcagagcggttaaaaatttcagctgaagccgtgaataagacagtcaaagaattaacagaaaaaaactattgcgaaaatggacggatcacacaggatggtctggatgcattggaaccttatcgtgtgaagagagcagtatttgttgcagcaggctttggaagccggatggtgccgatcactttgaatacgcctaagccgcttgtcagagtcaacggaacgcgtattattgattcacttcttgatgcagtggtagaagctggaattcctgagattgttattgtgcgtggatatttgggagaacagtttgatcagcttctttataaatatccgaacatcagatttgttgagaatccgatttataatgaagcaaataatatttcctccgctgtatgtgtcagatatcttctgcagaatgcgtatgttttggaagcagatttactgctccgtaataaaaaactgattcgtaagtatgaatatgaaacaaatttcttgagtattccggtggagtccacggatgactggtgttttgcaaccaatcataatggtgtgatcacagaagaaaaagtaggtggtaccgactgtcatcagatggttggaatttcctactggagtgaagcagatggaattaagcttgccaatgacttaaatgaggtttatttatcgcagggtggaaaagagcgctattgggagcaggtgccgcttgtttataaaaaggaaaattaccaagtgcatgttcgtgaatgtattgcagaggatattacagagattgatacatttaacgaattaaaggcaattgataatcgttatgtcacaggttgataaaagcgacaaatgtgagcaattaaaaaatgataataaaatcactttctctggaacgtgattttattatcatgatagcattcggatttgctttcaaaacaagttcaatcacagcctttatggcagatgtatcgaaatagttctttttgctgtcataggtagttggaactgcgcttgctacaaagtcagcattcttataagtggattcatcgtctaaagtggcggttatattcaaagctatgaagagcagagtgctggatattgttttagcagagaatccatttgttgaactgaatattattcgagcaatggtattacgcaaaaaatataatatgatctattcgaaaaaattagcaaatatcatttgtgaatatagtcaaatgaaaaattttacggatcaggtcatggctattcaaaagaaacgttatggatattatgtggttgacaaaaaaataattgaagaagaaatagaagttgcaaggaaacaaagttaagagcaggaatttaataaaatactttaccaaaaatcgtttagtcttaggttctaagcgatttttttgtttattgaatagcgaaaatgtcacacgggaattagatattgaatcatattattatacaaaaatagtattcgtagttcttatattttatctaaattcttaaaattaaagaataattcttatataaacagaaaatgataaaaatatagaaaattgtagatgaaataagttgtgcttgcactgaaaactcgctatattataagtatcaaatacaaaaaagagaaacgggtgaaatgcgatatggcagtatatgttgtcggtgattttttgagagaaaccaggttgagaaaaggatatacgcaggaagaagttagttacggaatctgtacacctgcgtctttgtcgagaattgaaaatggagcacaaaaaccgggacgacttattttggagaaactgtttgaacgattgggtacggagaataatttgtttaattcttttgtgagcagggaagaaatggagttgtatatagaaatacagacattgattagaaatgtaacagatgaagatattgagaaaattgaagaacaaataaatgtagtagaaaaattagttaagaatacatcagagttagagcatcagtgtttattttgggcgaaaggaaaacttgcagcacaaaaagatggtaataattatgaagcaatgaattggcttatgaaggctattcggattaccttgccggattttaatggaaaaacgccattaagaaatcatttgttaacttttgatgaaataactattattaatagtattgctgtcagatatgcggaaaatggggagttattagttgcgatacaattggatatgtggttaaaagaatatatggaaagtaaaattgttgacgcaaagattaaaactactaaatatcctatgattctatataatttgagttgttggtttgaagatgaacaatgttataaagaagaattaaaaatggcagatcaaggaatagaattttgtgttaaatatggaaatcttgcagcatttccaaggttagtattaaataaaggagtagcattaacaaaattaggagataatgtcagcgctagaaaatctttacaccaagcgattactatttttgatgcaatgcaaaaagataatacagtacaacatataatcgcttggtgtaaagataattgcaactttgaaatttagtatccaccttccataggaccaagaacagaagcaactacattcgagttatccacaactcctgtgcttccaacaatagaagcggctgcaataagtgcacataatgtgatagcaaaaattttctttttcatggttttgtacctccaattaattttgagattatggtaaattccagaggacaaagagaccatccgatgtgacgtaaatttaaatttacgcgatatcgaatggtctttttgcatgaatgagaataaaattaattagtttaacaggttactttggggattagggaaattgttaaaagagattgaaagaaatgaaaggaaaatgtgagttatggtaagaccgggattacgtcgcagcgaaattgattgggagaatgtggatattcatatctccagagaagaaatggagagagagcaggagcatgaagcagcaatacagcaggcaaaacagtatctgatcaaaaactttccgaagttttgtacaataaataatggctattatgagacagagacgtttaatcatgatgcagggatgtatgaagtaatgcatgtagatcatatcgtgattggtgatcaggcaatctatgtgatcaagacagtgaagtttccggagcatgttgaattatacggaagctcagacacaaaaacatggtattatgcagagaacacagacaaacaggaaacgcatacgcacagagtggataatgcggataagagaaaccagagatattgtgagtacatacagatgttggcaggagaagctatcaggcgggatgtgccggcgattgcaattgtcaatatcattggacttacagatgagcagatccatttggatatagaatcagggcatgaggttgtgacaatggataatctggcagacaggatcaggtattatgagagtataattgacagtgatcgtgtggcgtatgaacatagcgatgatctgataagaaagttcaaggaagaagaggtgtatgataatatcattccgcagatacgggatgtggagctgaaatacagaatatatttgaagctatcggaatagatttcggtgagattttaagcaaatcttaagatgaaatcatcgtttataggtttacaagcttcctcttatttgataaaattctattttggtatgtaagaataaaataggtgtcttaaaattttgagatgcggtcactttaggaggaaatgatgagttttattaacacagtgtttggtattccgcttggatatgtcatgtggggatgctatcagttggtgaaaaactatggtttatcaatcattctgtttacattggtcagcaaaatcgttatgctgccagtatctattatggtacagaaaaacagcattcgaatgatacaaatccagccacaggtaaatgaaattaagtacaagcatgctggtgataaggatcggattgcagatgagcagatggaactgtttaaaaaggcgcattacagtccaatgcttggaatggttccgatgctattacagattccattagtacttggactgatcaatgttatttataatccgatgcagcacttgatgcatattcagacatctgtctgcgaccagatcgttgcagctacctgttcactaatgggagtagatcagttaggaagcggtgcacagcttcaggcaatggcagctttgcagaatccggataacttaagctttttccagaatgcattgacagggacaggcattgatattgaggcaatcgcagcacaggcagctacgatcaacacacatttttttggtctggatctgtctgtagttccacacattactgtagtggcatggatccttcttattccactgttcagctgtctttctactgttctactttgtgcatgccagaatcaggcaaatgtattgcagaaagagcagggcgcattgggacaatggggagtaacagtttttacagttgcattctcaacatattttacattcctggttccgggtggagttggtttgtattggattttcagtaacttgttctccacagcgttgatttacattttaaatgcagtttataatccgaaaaaatatattgattacgaggcgttggaggaaagcaaacgtctgctggcagaacagaaagcagtagaggatgcctataagaaaaagatggctccttataaggctaaggaaaaagaggactataagaggttttttgccaaagacaatgaaaataaacagttaatgttttattctgaatcctcaggattttataaatattatcgtggaatgattgaagagttattggaaaactcggatattgtgatccattatgttacaagtgatccggaagatcaggttttccagatcaggcatgagaggtttaaagcatattatatcggagagatcaaactgatcactctgatgatgaagctggattgtgatattgttgttatgacaatgcctgatcttgaaacttatcatatcaagagaagctatgtaagaaaggacatggagtatattcatgtgccacatagtattgacagtatgaatatgacgtatcgaaagggaagtatcgatcattttgacactattttctgcgtaggtccacatcataaagatgaggtcgagaagatggaagaaacctatgatcttccgcataaagtattgttaaactggggttactgcctgctcgatgatatgcgaaaagattatgagtcaaaagaaaaagtgatcaatgaacagaaaacgatcctgatcgctccgtcatggcaggaagataatattgtggattcctgtctcgaggatattttacagaaattgcgggctacaggatataaggtgatcgtgcgtccgcatccacagcatgtaagacatatgccagagaagatgcaattattaaaagataagttcgcagaagataagaatattgaaattcagacagatttttcttctaacgatacagtatttaatgcagatctgattattacagactggagtggtatagcatatgaatatgcgtttacaacattgagacctgtattgtatatcaatacgccgatgaagatcatgaatccggaatatgagaaaattggggttgtaccaattaatattttcatgagagacagcattggatgcagcctgaatctggatcagttagatcgtgtggcagatgaagcaacgagattgatcgagcagagagatttataccatgataagattgatgcttttgtgaaacaatatgtatatcatttgggaaccagcgcaaaagttggagccaattatataaaattacgtttaaaacaaattcattcagaagattaaaggagaaaagattgatgaaaaatttaatgaaacagattacaaagaacggaagaattttttgggtgacttattttactttctttcttattttggcaatgccaacacatgcatgggcatatgttgatccggcaaccttaacttatgtagttcagatcattgcaggtatttttattgcaggtggtgttgcagttggtgtgtattggagaaaaatcaaaaagtttttctctaaggacaaaacatctgttaagaagcatgagtcaacagagcaggaaagaaatgcagcagcagccgcagcagaagaatttaacgaagaaaaataaagtttgatttttgggagatatgtaaatgagtattaagagaaatattttgttaaatccgggaccatcaacaacaaccgatactgttaagatggctcaggttgtaccggatatttgtccaagagaagatgaatttgccggaatgatgaaacaaatgagagaagatctcgtgaaaattgtacatggagatccagagaaatacacagcagttctgttttgcggctctggcacattgaatctggatgtatgtgtaaattcacttcttccagaagcaaagaagattcttgttgtaaataatggcgcatatagcagcagagcagttgaaatctgtgaatattatggattggatcatatcaatctgcagttcccaatcgatgaacaaccggatcttaaagtgattgagaaaacgatggaggaaaatccagatattgctgtggtatatacaacacataatgaaactggtacgggtgtaggaaatccgattcgtgagataggggcaattgcgcatgcacacgatgcaatttttattgttgatacgacttcgacatatgcaatggttccaatcgatattgaaaaggataatatagatttttgtatggcatctgcacaaaagggattgatgtctatgacaggattatcttttgtagttggtaacgaagaaatcataaaaaaatccaaggattatccaaaacgctcctattattgtaatttatatctgcagtatgaatattttgaaaaaacgggtcagatgcattttacaccaccggttcagacggtatatgctacccaacaggcattaaaagagtattttgctgagggagaagaggcaaagtgggcacgtcattccagagtgatgaaagccattcatgagggactgaaagaacttggatttaaagaattgatacgtcctgaaattcaaattggcctggttgcgtcggcagtatatcctgatgatccgaattggagcttccaaaaagttcatgactattgttatgagcgcggatttacgatttatccgggaaaagtgacaactactgatacatttcgactgtgtgcgttaggagccatcgatgtggaagatattgaagagttttttaaagtgttaagggaggcacttatagaaaataatattcaagttccggtacaatacagatagtgaaaggatacaatatgaaaacagtatatatgtgttttgctacagacgtgatccatgaaggacatatgaatgtagttaaaaaggcaaaagaatacgggaaagtcgtagcgggtgtattatgtgatgcagaaatggttcgttataaccgtttcccaacagtgagctttgaagaacgtatggcaatggtgagaaatattccggaaattgatgaagtgattgtacaggataggattatgtatgataatgtcatcaaagaattaaagccggattatgtcattcatggtgataattggtgcgatggaccggaaaagacgattcgtgaaaatgtaattgctttgttgaaagaatatggtggagagttgatagaggttccatatacatataatgaaaaagtaaagaaaattgatgatcagattaaggaaaaactggcaatgccggaatatcgcaggaaaagattaagacagttgataaaaacagtaccaattgttaaaacgatagaagttcattctggattaacaggtcttattgctgaaaagacggtagtggaacatgatggaggcttagaccagtttgatgcaatgtggatttccagtctttgtgattctactgcaaagggcaaaccagacattgagcttgttgatatgtcttcacgtctgagaacgatcgatgatgttttagatgttaccacgaaaccaatcattttggatggagatacaggtggattgatcgaacattttgtttataatgtccggacattagaacgtatgggtgtttcagcagttattattgaagacaaaacaggcttgaaaaagaattctctgtttggtacggaagtagaacagacacaggattctatcgaaaatttctgcgcaaaaatcagagctggtaaaaatgttcttcgtacagaagaatttatgatcatagccagaattgaaagcttgattttagagcgtggcatggaggatgcgttaaccagagcttttgcatatgtggaagcaggtgctgatggcattatgatccacagcagaaagaaaacagcagatgagatcattgaattttgtgacaagtttcgggaaagatatgctgatataccgattgttgttgttccaacatcttataattatattacagaggcagaactggcggctcatggtgtaaatattgttatttatgcaaatcagttaaccagaagtgcatttccggcaatggaaaatacagcaaaagaaattttgaaaaatcatagggctctggaagtggattcaaaacttatgccgtttaaagatattattacattgatagatgaattgtaatttaaaattggattacgaatattgatgtagtggtataataacttttgatgaggataaaagagatgagagtagaaacattatttgatgtattagattctgatttttatacgggagttccggattcacaattacaggcattatgcaattttctgattgataagtacggaatttctgaacatcatgtgatagcagccaatgaaggaaattgtactgcacttgcagctggacattatcttgcaacgggaaatgtacctgttgtatatatgcagaacagcggtattggaaatatcattaatccggttgcatctttattgaatgataaggtttatgccattccatgtatttttgttgtgggatggagaggagagccgggagttcatgatgaaccacagcatatttatcagggtgaagtgactttaaaattattagaggatatggatattcagacttttgtaattggaaaagagacaacggaagctgaattgtatgcaaagatgaaggaattccgtaatgttcttacaaagggaaagagcgttgcttttgtagtgagaaaagatgctttggaatatggtaataaggtcatttattccaatgaatatcaaatgaaacgagaggaagttcttgaacatatcgttactgtaactgaaaatgacccgattgtcagtacaacaggaaaagcaagcagggaattgtttgaaatccgtgaaagaaatggacagggacatgagtgcgattttcttacggtcggttctatgggacatagcagttcgattgcacttggtatcgctatgagcaaaaagaatgaaaaaatatggtgcgtagatggagatggtgcatgtctgatgcatatgggttctatggcggtattggcaagcagaaaaccggataatatggtacacattgtgttgaataatacagcacatgagactgtaggaggaatgccgactgttgcaggaaccatagatcttgtcacaattgcaaagggctgtggatatccttatgctgtatgtgttgataatttcgctgatttagataaggaattaaaagcagcgaaagaagcaaagagtctccggtttatcgaggtgaaatgtgcacttggttcccgcacagaccttggcagaccgactacgactgcgattgagaataaagaaagattcatggagagattgaattgaaatcatatatcgtaaaacagaaggacctgaatagtcgtatgctatccaggtccggcggcgtttttgcagcaatatctgaccaggtgttagcgcagggtggtgtgatttacggcgcaggaatggataaaacttttaatgttgtacacaaacgcgctacaaatgtgacagagagagatgaacttagaggatcaaagtatgtgcagagtgacatatacaatgcatatcggcttgcctgtgaagatttgaaagccggccggttggttctgtttacaggaactccctgtcaggtggatggtataaaggctttgtgtccaaaaggatgtgaagaacatctcgtttgtatggatatcgtgtgtcatggtgttccaagcccaagagtatggaatgattataagacgtatatggaacgcaaatatcatgggaaaatagaaaaaatagattttcgtaataaagaacgcttcggatggtctgatcattgggaaacagttacaattaatggaaaagagcatgacagtcaggtttatatgaagatgttttatgaacacacttttttacgtgaggcatgctatgtatgcccatataagaatctgcagcgtatatctgatatttcaatagctgatgcatggggagtagagaacgcaaacccagaatttgacgataatcggggggtttctcttgttctcataaatacgccgaaaggagaaaaatggttttctgactcattggaggagtgcaattatattgagtgtgatatagaaaagtatatgcaggaacctcttcgaaaaccttttcaaaaacctgacaatacagaacaggtatggaaagaatataatgagacctcgtttgatgaatttgtaaaaagacattataaagaacctcttttatcggttatcaagagaagcttaaaaagaaaaataaagggtattgtaccgaaaagtctttggaatcgacttagaggatggtgttaatgtatgaaagagaaaagaataccggatttatgcacaaaaaaatatacttgttgtggatgcagtgcatgtgcattggcatgtcctgtatgtgcaattacaatgtgcccagatgaaaaaggttttttatacccaaagataaatgatgaaaaatgtataagatgctataagtgtgaacaaatttgcccgtttaaacgaaaagatattttttaatatattcttaaaatacttttccattcataaatcatgtggtagaataattttagattaactatatatagggtttagttatgaagaatattaagagatgagaggtatttacaattgaagaaaagagcacttgtattaggaatgatgatgacacttgcagtgacttcagttggctgtggcaagaaggaggcagatgctaatatcacaaaaccaatttatgaagaatcaagtgaagaagatgtagtgggggatgtcgtttctgatgaagaagaggaagatcttccggatggaaaggttcgtaatgaactgacgggagaactgattgatgaatcactggcgaatcagcgaccaatcgcggttatggtggataatgaatcaattgcgttaccacattacggactgacacaggcagatattgtttatgagatgatgaacagtactgagaatggtcgtattacaagattcatggctttagtgaaagactgggagacattagaacagtttggaagtattcgcagtgcaagggtaacaaactgcattctggctgcagaatggaatgctgtattatgccatgatggtggtccattctatattgacgaatatattgcacttccaagtgtggatgattttaatggcggattttcccgtgtcaataatggaaaatccagagaatatacagagtatattgtttctggtgatctggacaaaaaatttgcaagcacaggtgcaagcaaagagtataataaatattatacagaaaatcactttaaattcgctaaagaagacactgatattgcggatggaacaactgcagttacagtagatattccgtttcctcataatggctcttatttgacatatgacgagtcggagaaggtgtataagtactttgaatacaagaaagagcatgtggatccacagaatggtaatgctcaattgagttttaaaaatgtgattttacagtgtacaccatttgaattacacagctggggtgacggtgtatatgatccaaacggttacatgtactataagatcgagaataataagggtacaggttattatattacaaatggtaaagcggaagagattacatggtcaaaaggcggattgacagataacacaaaatattatgatgcatccggcaatgaaattaagattaatattggtaaaacatacattgcattagttccggatgatgcatggggagatcttgtagtagagtagagtactttaacaggtaggatttatccagagaaaacacaagataagatagtgttttctctggattttttgtataatgaagtgatggtagaacacacgatagtgcttataatgaaaatatgaggaattatttattatgaaaataaatgcttcaacgctgctttatggaattcgttatattagaaagtttggattacataccctatggattagaatcgcggaaaagaaacagaaagataaatttgattatcaaaaaaatttttctaaaatgcaagcctcgaacgaagagttggataagcagcgtaatgaggttcacggatgggacagacaggtaaaaattagtattgtaacaccgctttataatacgcctgaaatatttttgagagaattgatagaatcagtttgtgcatcgtcttatgaaaattggcagctttgtcttgcagatgcaacagatgttttaagcagccagacaggtgcgagcaagatagaaagcattgtaaaagagtatcagaaaagagacgaaaaattaaccggcaaaggttcacgtatctgttataagaaattaactcaaaattatggcatagcagaaaatacgaaccaggcgattgaaatggcagaaggagagtatattgcttttttggatcatgatgacgtgctgacaccggatgcattgtatgagatggcattagcagcaggaaaggctgaaaagtcaggcaaaaaagtggcgatgttttattcagatgaagataaggtaaatgagaatagaacagcatttttggagccgaatttcaaaccggattttaatcaggatctgttatgtgcaaataattatatcacacattttctgatgatcagcagaaaactgctggaccggataggaaagataagcaaagagtacgatggggcacaggattatgattttattttacgatgtgcggaacaggcggatgatgtcattcatgtaccgaaggttttgtaccattggagagtgcatgatcgttcaacagctggcggcagtgggagcaaggattatgcaattgatgcgggtaagcgcgcaatcgaggcacatttacagagaatgggtgaatgtggaaaagtcactgttatgccatattttgggttttacagagtcgaatatgaagaatgcatgaaggaaaagcgagaagaatgtgtattgtttattgatcaagctataacacctttgaattcagactggcaggagattttatatgcagattgcagtcgtaaggggattggtgttgtaggaggaaagatttatgacagacatcatcacgtttttgaggcggctttttttgaaaagaaagatgcagccggaaaaagatttttggataatgtgtatcgtggtttaaaagaaggctatggtggttatatgcacagggccaatattcaaatggactgcgatggagtatctgcaaaatgtatgctcgtaaagaaaacagtgttggataaaatcgaagattacgagagcttgacaaatcaaccagaatttgcagaattggtttgttcaacagcaaagaaaatggggtatcgggttatgtatgatccagaggtaaaaatgatttttaaatcatgagaaattgtgtataatagaatggatacatgcaaattgtgtcgtcatttgtcgtgtaaaataagtgtgaagctgttttttgttgtgctataatgaatttattgtagaataaaaaagaggataagtgcttatgatgagggtatatatatgtccggactgtggctggatgcgcatggtctcaaggcgtaaaaacgtggaatgctataagtgtggtgtgcaggatatgactttggcaaaagtagattttgctacatatgtatcctggtctgagaaggaacggcaggaatattcggcagcatggatgtacatacatagcaaaggaaaaacaaaaaggaattaggaattattcatgcaggaagtcacaattgtaatcccgaattataatggaaaaaatttgttggaaaattgtctgagaactttagaaaatcaatcatacaaagattttaaggtgctggtggttgataatggatctacagatggaagtgttgacattgattcaggaactttagatatagaatggattgttttgaaggagaatcttggattttgcggagcggtaaatctgggtattcaaaggacaagaacaccatatctcattttgcttaataatgatacagaaacagaacaatattttgtggaagaattgctgagaggaataaaatggtcagagcacattttttcctgtggagcccagatgatagattataggaagcatgaagtgttagacaatgcaggagatctctatacagccatgggatgggcagttgccagaggaaaaggaagattatgcaaagattatgaaaaggtgacaagagtattttcctgttgtgcaggggctgcaatttatcgtatggatatgatacggaagattggcggacttgacgagaaacattttgcttatctggaagatgtggatctgggatatcgtgcaaggattgccggatttgaaaattggtatattccacaagctaaggtttatcatgttggaagtgcaacaactggtacacgctataataagaaaaaagtatttctggctgcaagaaatactgtttttgtgttgtataagaatatgccagtcttgcagctgattttaaatatgccatttatagttgtcggagttctggcaaaaatgctttttttcaccggaaagggatttgcaggtgaatattgcagagggattttcgaggggatttgtgagagcagaaaatgtcggaaggtaaaatttcgtatgaggaatttactgaattattttaagattcaattggagttatggctgaatattgtgcgcataatgtaaaagaacggtattgtttttgattacaatataaagaaataattaagattttgagacgcttgttttaagaaaatagagttgtgatttcatggaaattattgtattattgaatctatgataacaaaaaaataaaggatagcattatgataaaagataatcagcagcactttaacagattgcatgtcgttttagatgcattggttgtcatcttttcttatgtacttgcctggtggttaaagctttcaggcattttcgcaaatgagcaggtcggtgttctttcattagagttttatatgaaagcactcatattgatcgttccactttatttgctattatattacgcgttcaatttgtatacgtcaaagagagtacagggaaggcgtctggaactttccaatattgttatggcaaatacggttggtatattaattgtgtttgctggatttttccttgtattgtcttattcagaagaagcaaagaacttttcacgttcaatgtttgcttatttctatgtattgaacattgttcttgaagaaatcgagcggcttgtagttcgtggctttttgcgcagcataagaagaaaaggatataatcagaagcatattttgcttgtgggatattcaaaggcggcagaacaatatattgacagaatcaagcaaaatcctcagtggggttatagtattcggggaattttggatgacaatattgcgcgtggaacaatttataaaggtgtgaaagtaataggaagcattgataaccttacttttattttaccggaaaataaattagatgagatagcaattacgcttggtttggaagaatattataagttggaaaagattgtcgcgcaatgtgaaaaatcgggagtgcatacaaagtttattccagattatggaaatattattccgacaagaccatatacagaggatttgctgggacttccggtgattaatattcgttatgtgccgttatcaaatacatttaatgcaatgattaagcggttgacagatattgttggatctttgatctgtattgtgattttttcaccagtcatgcttatctctgcgattcttgtaaagactacttcgtctggaccattgatttttaagcaggaacgggtaggacttcataatgaaaaatttatgatgtataagttccgtaccatgtatgttcagtcagaagaagaagaaaaaaagggatggacacagaaaaacgatccgcgggtgacaaaggtaggagcctttttgcgtaagacaagctttgatgagttcccacagctttttaatgtattaaaaggggatatgagtcttgtgggaccaagaccggagagaccacagtatgtagaaaagttcagggaagagattccgagatatatgatcaagcatcaggtacgtccgggaatgaccggatgggctcaggtgaatggataccgtggagatacatcgattcgaaagagaattgaacatgatttatattatattgagaactggacattagggttagatatgaagattctgtttctgacagttttcaagggatttatcaataaaaatgcgtattaggagaaaatgattcatgagtagtgagacaaataatcgtcaaggcagacataagccgctgacaaagaagcagaaagaggcaatcagaagaaagaagagacagagaaggattatcttgttggtaattgaagtacttgtagttttgttattggctggtgtccttttcttagtcagcaaattaggaaagattgagcgtagtgaggtgcctcttgagaacattgaggtaaatgagggcatttctgaagaatcgcaggaaattatgaagaattataccacgattgctttatttggtctggacaaccgttctaatggtaatttgtcaaaggggcgtagtgacgtcattatgatcgcaaatattaataatgacaccaaagaagtgaagttatgttctgtattccgtgattcttatctggatacaggagatggaagtttcaagaaatgtaatgcagcttattcaaaaggtggtccggaagcagcgattaatatgctgaataagaacctggatttatcgattaccgattatgtgacggtagatttcaacgcggttgttgaatgtgttgatttacttggtggcattacattagatgaagtgacagatgaagaagcagttctcatgcagggatatatggatgagatcaataaacttacaaaacataattccaagtatctgtctggcggtggaacaaacgtgcagttagatggtgtgcaggcttgtgcatatgcgcgaatccgttatactgcaggagatgactataagcgtgcagaacgtcagagaacggttattgccgctatggtagcaaaagcgcagaagtcagatcttatgaccattaataagttgatcgatgcggtatttggggatattcagacaagcttttcaaatgcagatctggttgcattggcagcacaggtatttaattacaaacttggtgaatcatctggattcccatttagtaagaattcaacaacgcttggatcaaagggaagtgttgttgtaccgtgtactctggagtctaatgtaattgagctgcatcagttcctgtttggtgatgaggaatacacaccatcagataccgttcttgcgaacagtaagaagattatcaatgacacaggtatgaatgagggaaatggttacagataaatgacagtagatattatcattccaacttataaaccggatgaaacattatgtctgctcttgcataaaatgcaagggcagacctttgtcgttcatagggtaattattttaaatacagaagaagcgctctggaaacaggcagttgcagcgtatccaatcgagcaggtattacaggaactgccttgcgagcatgaagtgattcatattgcaaaaaaagattttgaccacggtggaacgaggcagtttggtgcagaatattcagatgcggatgtgatgatttttatgactcaggatgcagttccggcagatgaatttctggtggagaagctggtagaggcgctgggaacaggcggagaatcagaaagtaagcagaaatcggctgagagagatcttggaaagagtggaggcggaacaatacagatagctgtagcttatgcaagacagcttcctcaaaaggactgtcatattgttgaacagtatacaaggcagtttaattatccagagcagagccgtattaagacaaaagcggacatccctgtacttggaatcaaaacttttttctgttcggatgtctgtgctgcatatcgaaaggatttatttgaagaacttgggggatttgagtccccggttattttcaatgaggatatgttttttgctgcaaatgctatttcgcatggatatggagttgcttatgtggcagaggcgaaagtgttccattcccacaattatacgatgcaacagcaatttcaccggaattttgatctagccgtttcacagaaacagcacccggaaatctttgaacaggtaagttcggaggcagagggaatgaagcttgtgaagagcacggttgcctatctgtttaaaatcagaaaaccatggcttatttttcattttggaatgcagtgtgtcggaaagtatgcaggcttctggatgggaaaacattatgagaaacttagtagaaaacagattttgaagtataccatgagcccgggatactggaaattagttgagcgggataatgaataaggtggagaatttccgcaggagaggatgctcatatgagtaaaacattgtatattgtagttccgtgttataacgagcaggaagtacttccggaaacttcaaagagactgcttgaaaaaatgggacagctcgtatcagaaaataaaatagctaataacagccgcattatgtttgtgaatgacggttcgaaagatcagacctggagtatcataaagcaattgtgtgatgaaaatgttgtttatgcaggagtgaatctatccagaaacagaggacatcagaatgctcttttagctggtatggcaacagcagtaaagtatgccgatatgattgtcacaatggatgcagacttacaggatgatattaatgcggtcgatcgtatgatcgaagcctgttatgcgggaaatgatgtggtttatggggttcgatcatccagaaaaaaagatacctgttttaagcggggaacagcgcatttattttataaactgatgagctttcttggtgcggatattgtctatgaccatgcagattatcggttactaagcaggcgcgcggcagaaaatctgctggattttgatgaggtaaatttatttttgcgtggaattgtgccgatggttgggtttcagagcacgacggtggaatatgagcgtggagagcgttttgcgggagaaagcaagtattcgctcggaaagatgattacatttgcatttgaagggatcacctctttatcggtgaaaccaatccgaatgattacgattggtggtttattgatttgccttgttagtctgattatgctgattaaatcatttgtggattattttaatggcaatgttgtgccgggctgggcaagtattatggtttctatctgggtgcttggcgggttgcagatttttgcaattggtattattggcgaatacattggcaagacgtatctggagacgaaaaagagaccgaaatatattattgagtcggtaattttgaaagaaaacaatgtagagtagaccaaagtatcatgtattatggagattataactagaaaatatgaacgtttacagtgaaaaaaataagaaagttcagaatgcttcagtgttgttcttttggggattaatggcggttgtgatttttctgattttgaatcagatgggatattccgacggtgatgacacctatttctaccattattctaccacaatgggatttttcgaatatttatcctggcggtatcagacctgggttggaaggatggcgtcggaagcacttgtctatcttacttttaatcttggacttggtttctggcgggtggcagatgcgattatgctggtgctgcttccggcaggaatcttaagactgggatgtaaagcggcagggtataccggttatgcggattttttgaataagtgcgaaaatcgcagtaacgcaggagaaatcttgaaacattcttcaactgtttatagtaatataggagaaatagaaacagtagacttgaagaatccacaacaaaaaacccggtggcagaaaacatggtctgaaatccggtatccgcttcttctggcaagtggctatttattattgagtgtcatgacacttggctattctgctatctgggtaaatggttcgattttttacacctggacattcacggcaggcgtgtgggcaatgatgccgcttgcagacgccgtttttgacacaggtgcattttcgggcagacagtttatttatacaattccgtgtagtattatcgctgcgatgtcgatcgaacagatgggcgcggttttgatcgcatttgaagtgctctcgattttaagtattctgatgcagaaaaaaaaggtgccggtcatgatatggatacagcttgttgtgacttttgtcgcatttgtactgctttttatggcaccgggaaatgggatcagagtagcatctgaaattacaacctggatgccggggtatccggatttgtcactgggagctcacttatttatgacaatccagtggctgctgtcttcttttgcaaatgagagcaaagctttttttgttgcaatctgggtggctgcaattcttttactgggcaaaaaggaaaatggaaaatgctatcagattcttgcaacagtttttagcgtagtggcattgcttccttatgcaggtgttcattttttctctgaaatgggaattggctatattgatatcgaacagtgtctgacggaattgccagcctggcagaaaatgacgacgcagaataaaattgcgtttttctggtggattgcagcagtgttttttacactgattttattatggaaagtgacaggtcattccatatttataagtatggtgttccttggcggaattgccagcgaggcggtattgcatttttcaccgacaatttacgcatcgggtgcgcgtgtttactatctgacagatctcatgtatctgtttatcattttgtggctggtaatgcgtatggagggtgagcggaaaaagaatttctttattgcaggaacggtggcgcttggcgtgattaattttttatcacagtattctgtgatgttattgaagttgtaatatatggagaaaaaacattttttcttgataattttatcacaattcgaacacaatttgacgctagactaaggtcataaagataaaggcagcggatatcaaagaagctgcggagaaaggggcaaattgttatggataacaattattacaacaataataacaatagtaataacaacagtaatcagtcttctgattctttctactcatataacagccagcagaacaatggaaatcagaacaaagcacaaaatgaggcaggatctcaggcaggtggatatggttccacacaaagttccatttatggaagcagccagagcaacggacagagttcaggttacggaagtacccggagcaacggacagggttcaggttacggaagtacccagagcaatggacagagttcaggttacacaaacacacagaatatgaactatggctatggcagcacacagcacagccagcagaataccggatatggcagtacttcccagaatatgtatggaagtcagacaaacagctatggcggcaatgcaggttatcagaaccacagctatggagccaatggcagtgcttatggaaacaatccaaaaccggaaaagaaaaagaaagagagaaaaccgggcggatttggaaaacagcttgctaaatgtgcagcacttgcacttgtgtttggactggtagccggtggtgtgatgacaggtgttaattatgcatccggaaaaatccttggaacttcaaattcaagtaatgtgcaggcttctcttacaacaggagatgattcaactgtaaaaccaacagcagtatcttcttcctatgttgctaatgatgtgtcagatattgttgatgaggttatgccttcgatcgtagcaattacgaatgtaagccagacagagtaccaaagtttctggggacagtccaagacatatgagagcacaagttgcggatcaggtattattgtaggtcaggataatgattatctttatgttgctactaacaatcacgttgtagaaggcgccaacagccttaccgttactcttgcaaatgatgatacggtcagcgcagagatcaaaggtacagatccttctacagatcttgcagttgtaaaagttgcactaagcagtattaaggacgatacaatgagcgcaatcaaggttgctacattaggatcatctgatgcattaaaagttggtgaatcctgcatcgcaatcggaaatgctttaggttatggtcagtcagtaacgactggtgtgatcagtgcattgaatcgtgaagtttctgtttcagattcatccagcagcacaaattatacagcagaactgatccagacagatgcagcaatcaaccctggtaacagtggtggtgcattactgaacactgcaggtgaagtgattggtatcaactctgtaaaatattccgatacatccgttgaaggtattggatatgcaatcccaatggatactgcaaaaccgattattgaagaactcatcaccaaggaaaaagtagacgagtctaatagtgcatatcttggcattgctggtgttgatgtcacaagtgatgttgcaaaaacatataatatgccaacaggtgtttatgttgcacaggtaacagaaggttcagcagcagaaaaggctggtattcagaaaggtgacattatcacaaaatttgacggaaaagatgtaacttctatggaagaactttcttataacatgcagtattatgcagcaggtactacagtggatgttgtaattgcaagatcttcaaacggacagtatgaggagcagacaatctctgtaacacttggaaagaagaactaaaccggagtttaacgtatgaactgccgcttgtgagtggtgttacggattttcgcaggttatgtcgtattgcatgccaacaaggtatttataaacgtaaaaaatagaactgtttgttttcaggagcgcttccgcttgttgtcgctggcagcggtactaagaaagcatccatcgtgatttcaaaatccaattgacattgtcttttgaaatcgcaatgtctgttttctaaggaccggccgctcccaaaatcctgaaaacaaatcagttctattttttatttgtccaaggctgtgcagcatgcaatatcccagttgtgaaaatccgtcaatccgtgttacgagcggcagaacccaaagatggaactccggtttacatatccgatgctaagtgatatgataaggcacatgtaattatttgaagttttgtcaggagggaaaacaataatgaaagaatttttatacaaaatcgtagaatggatagcagagatacatagttacctgatgaggataaatgataattatgaatatcatttttcagataaagagctgcatttcatagtgataggattgctcggaatgttatttatatttatcgtgtatccggtatttaaatggctggcaaaacataatcacgttatggtgattgcatggatatatgtatttacattgattctggttattaccttcgcaattgaaatcggacaaaaagtaaccaacacaggtgcaatggaatttgcagacatagtattcggtgttgtaggatttattgtgatgttttttatattttctgttgtcagagaaatttatcatttgattggaaaattaataaaatatctgcagcaaaaaaataaataaaaaggaaaatcgtacaaacaaatatgatttcctttgtgagctttgcgaacaggaacatcatatttcgtttgtacaatttttctttataataaaccctaatcttgacttgtgaacaagacactgatatctgcccttcgaaaacctacgaagcagccataaaatctgttttaatgttccattttccagtaagctgcgctataaggaggcagttcactgccaccgccgaagtcgtgtggttcgccggtaatcaggtctacagcagttccgcatcctgcatcaaaatgtgccataaaaggctgatcatctgcattgattgctacgaggacacgttcagaatctgttttgcgttcaaaaatacactgacggttggttaagagaacggagcggaaatctccgtaatttaaagcgtttgagtgtttttttgcctctgccagtctggaaataaaagttgtgagatcattccattccggtttttcaaagcaggcacggagagcaggatcaccttcctcttttctggcttttgcaccccattcactgccataatagacgcatgggatacccggcatgccaaaggcgagagcgtagatcaaaggcagatgattttcatttgttaaaatacttgccactctggtaacgtcatggttatccacgaacgagagcaggtgttttcccttgtagagagtccagttatccggaccaaactgacggagcagggagtgattgatctcaaacatattcatgctgttaaaactggaatgcaaccctttgtaacattcgtagtttgtgacagaatgcagcatggaatcattcatccactggttataatcaccgtgaagtgtttcaccgacaaggaagaaatccggttttaacccatcacagaaagagcgaagccgtctgagaaaatcgtgatccagacagtatgcgacatcaagtctcagaccatcaatgtcaaattcttctacccatcctttgatgcacgaaaaaatgtgctggatgacatcttcattccgaagattcagttttacaagatcgtaattaccctcccagccttcataccagagaccgtcattatagtttgaatttccgtcgaaactgatatgaaaccaatctttataaggggaatcccaacgtttttccaatacatcctgaaatgcccagaaacctctgcctacgtggttgaatacgccgtccaaaatgactttgattcctgctttgtgtaaattttcacaaacagatttaaagtcctcatttgtaccgagacgggtatcaatccgggtgtagtctcgggtgttataaccatgcgtatcagattcgaataccggtgaaaaataaatggcatttgctccgagtttttcaatatgaggaatccagtcatttacttttaaaatgcgatgttctgatacaccatcattttcaaaaggtgctccacagaatccaagtggataaatttgataaaatacgctttcataagcccacatgctaaaacctccagtttattacagatttcattattttttgctcatatcgcgcgatttctgtgagcaggcgcgctgggcagaaatcacagtgttgcggaaacctccggcttccagagcagcgacagcctctatagtggttccggcaggggagcagacagcatcttttagctcgcccgggtgctttccggtttccaaaaccattttcgcggagccatagacagactgggcggcaaatttataggcctgtgcccgcggcatcccatctgcgacagcggcatccgccatagcttcgataaacatgtatacataagccggagaagaaccggaaaccccgatgacagcgtccataagagattcactgatcacttccgatttgccgaaggagttgaagagtgcctgaacttcttttaattcttccgggatcacattttggttgacgcacaatgcgctcattgcctcacagactaaggctggggtatttggcatggcacgtacaagcttgactggtttgccaaaggagtcctcgatggcggcaattgtttttccggcggcaatggatacgatcacacatcctgattttatatgagaggaaatctgtgggattacttcatcaaatttatttggttttacagcaagaaataaaatatcactgcgttctgcaaccgtttcattggacagggttgtctcaatggaatatgcactctgcagtttttctaaggtagctgcggaatgggcacttgcaatgatctgactggttgtcactaactctgagtgtacaatcccgccgatcatggcacttcccatatttccagctccaatgaaaccgataatcttatctatcatatatcctccttgtttgcgaagcaaatgcgactgctcatgcaggagcagaggatgttgcctccttgtttgcgaagcaaatgcgactgcctacacatggagcaatgcccagcgagctgtgcaggatttgcctcattgtttgtgtcctgtattttctttcatcctagttcatttgttctgaaaggtcaaccttttagacataattagggctggaatactgcaaaaaaaatgaagtgttgattttcacacagtattccaggccgtaaaggggaggaaaaaataacaaactatagttgaaatatactttgtttttatttaaaaatttagtaggctgccagaatttcttttaaggcggcgataaatgcctgattctgttcttctgtaccgacactgacacggttaaaaccaaatgtactgatcataattttttgttctgcaagggcagcacggatttcttttggatcatggtgtgtgtcgaagtagatgaagtttgcgcatggttttgcaagagtgcagcctaattttgtcagttcctccacaagatattcacgtcctgctgtggtgagtgctttgatttttttgatatattcctgatctttcaaggcagtctgggcagcagcaagtgcgttgtagctgacattccatgcttgacaggctttcataagttcgtcgatcagcaatggatcagcgaaggtgtaaccgatgcggagaccagccatgccataaattttggagaaagtacgcagtacaaaaagaggtctgtcgtagccttcctggatcattttgatgaggctgtagtgagtaggatcttccacatattcgaaatatgcttcatctaccaccggaatgacatgatccgggagtttgcggatgaattcttcgacttttgcagagtttacataagttccggtcgggttgtttggattgcagacgatcaccatttttgtcctgtctgtaatggctgcaagcattgcgtcgaggtcgtaacagtaatcatcggtcagtgggagaacgacacggacacctccgttatcgctgaccatatccgggaaagcttcataagttggagcacagtacacaacttcgtccccataattgataaatacttcaccaagcatatcaatgatcgcagaggaaccggcaccgatacagacatgatctacggtaagaccatagagatcagccagctgctttttgagatcgacggcatagaaatcctgatacatatagctgttgagggaggcatccgtaacagctttttttaccgcatcagacataccgtacggattttcattataattcattcgggttacattcttcggggtggaagttttctgacgtgcaccacggttgctctttggttttgttttcatgctgtctcttaataaacattctacattcatcttcataatctccttgtcttttatttattcgtagataattgcgaaactcctcatatctttctttatattgttcaaaattaacaaaattttcgaaaacacgctctcgctacgtgtcgctggtaacagtactaagaagccagtcacgattgacatcgcacctgccttctaagaaccaatcgaacttgttcgattttggttcacccagtgttttctcaagcttttgttaatttttcacaattcaatttacgttctcatgagtttcgcaattatcaatataaattcagttgataatggaaaccggatgcccttctaagtagcaccggaaattatcaattgccatatcgatcgcgcggattctggattctcttgtgagccatgcaatgtgtccggtgatgacggtatttggtgcagttaacagtggactgccgtgaaccggtggttcatctgtcaaaacgtcaagtcctgcggctagtacctttccggttgcaagagcatccgcaagtgcctgttcatcgatgagggcaccgcgcgctgtattgattaaaatgacaccgtctttcattctggcgatggtgtcctgatcgatcatgtgctcggttgccggggtatgcggcgtgtgcagggaaataaaatcgcttcgggcaagcagctcgtctgacgatacctgttcaatgaaatcatactcagcacctgtttttttgtggcagctgtatgcgagcacatgcataccaaatccctgtgccatttttgcaaacgcaaaaccgattgcaccaagaccgatcacaccgatcgttttgtcatataattcgatctgtctggtgaccgatttacagaattcgttgtggttttccggtacagaccagtcgatcgttttgatacgggtgtcatgcgtgccgatatgatggcagacatccattaataaagcgaaagcgtattctgcgatcgtctgtgaaccgtagatggtattggaaatggaaataccgtgttttctggtcatttccgtatcgaatttttcccatccatgtcctaaggtggcaacatattttaaattcggatgctggcttaagaattcttcattcatattgtccggaccgatccacagtccgaatacagcgtccgcatctccgatataagtatgaagttgttctatattgggataatgtgcaggaacttcaatgacaacctcgtcaataccggggagctgctctagccgtttccagcgttctgtaagctcctttggagtgatatctgtctgaatgatttcctcctggatcacaacaattttcatttgtctgtcacctccatttgtttatgattgctaatataagttcaaaaatgttgatttgtcaagtacaaatttcttgcaaattaagtgaaaaaaaacaattgtgagacagcttcttctatagttaatatataaacgtgtaatatgtgtcatcagacgtaaaaatcacattttttacgtttttcacaataaaagtatagaaatcatgcgcattttgaaaaaagtatacaaatctataaaaattggctggattttgttgacaggaaaacaaaaagtgtgataaaacaggtttaatttaaaacagcaggcaatcaggcagcaaacctgaacatagcaaaggcgctagggaatcatccttagcgccttttctgtacacagatgctgttgtttacagaaaacagaagaacaatctatttcattagttcataggaaatggatgtttcttcggaacaataaggaggattagttatgacgaatacacctaccacattttttggatggatcatttttctgattcaacagtatcacggatattatttacaaggtttgcttacaacattagagacatctctggcaggtacgctctgtggatgttttttaggattcttagtcggcatcatccaggcaacggacatccgggcacaggataacctcattaaaaagattttactcggaatcccatgggtgatcacaaaaatttacgtcacaattttccgtggaacgccaatgatcgtacaggcaatggttatttattatggttcttccacattattcggacttgatctaaaaccatttaacgcagcaatttttattatcctgttaaataccggagcttatatgtcagagacagtccgtggtggtatcaattccatagatgtcggacagattgaaggagcaaaagcacttggcatgggatatgtaccgatgatgatctacattatccttccacagacttttaagatcatcgcaccgcagatcggtaatacatttgttgcaaatatcaaagatacttccgtattaaatgtaatcgcggttacagaacttttctatattacaaaagttgcagcaggaacatatttcagaatgtttgaggcatatacgatcacagcattgatttacctgacacttacattattattcaacggattgctgaagctgattgaaaaatatatggcaggaaaagaaagctatgaagttttaaatccggcggcagtaaaataaatcaggggactagatgaaagaaaagaggaaagtgctatggcaaaacaatcgatatttaaatttaatgaacgagtgacaaccgaggcaaaagattcaacgtatgagttccggggaccgatcatcagtgtaaagaatctggaaaagaagtttggagaacatgaagtgttaaaagatatcagttttgatctgtttgagggagatgtggtctgtatcatcggatcttccggatcaggaaaatctaccttattaagatgtatcaatcatctggaaacaccaacaagcggtcagattttatatcacggatatccactgacgaaggatgcttcgacaatcaaccgtttccgtttgcaggtaggaatggtgttccagcagtttaacctttttaacaatatgacggtttttgacaactgcatggctggcgtccacaaggtgaaaaaaagaagcagggaatattctacagaaatctgtatgaaatatctggaaaaagtaggaatggcaccttatgtaaaagcaaagccgcaccagttatccggtggtatgaaacagagagttgcaatcgcgagggcacttgcaatggaaccggaagtattgctttttgatgaaccgacttccgccttggatccggaaatggtcggagaagttttatcggttatgaaacagctcgcaaatgaaggacttacaatggtgatcgtaacgcatgagatggcgtttgcaagagatgtatccacgcggaccattttcatggataaaggatatattgtggaggatgcaccgccacaggagttatttaataacccgaaggaagcgagaaccagagagtttttaagcaggtttatgcagggttaaggttcgtaaaaagaaaaattgtatttgtttttaagcatagaaagaggaggacaatattatgagaagaaaattaacagcagcacttttgacagcagcaatggcaatttcattaacagcctgtggcggatcaggtgacacagcttcggcaggggcgtccgcaggagagaaagcaagtgtgacagaggcgggcggaacaacatcagcttccggaaaagaagttctccgggttgcaatgtctgcagattatgctccgtttgactggctgcaggaggatgactccaatggagcagtgatgacgtcgaatggttcttatatgaatggttatgatgtccttgtcgcaaaatacattgcagaaaaactggatatggatcttgagatcacacagattgactgggacggtctgatcctttccatccagtccggtaaagttgactgtgcgatcgccggaatgtccatcacaggcgagagatcacagtcggtagatttctcagatccgtattacaatgcaaatattgttgcggttgttgcggctgacggaccgtatgccgatgcagtaaatgttacagattttgagggtgcaacacttacctctacactgaacacagtatggtacgatgtattagaccagatcacggattatgcgacaaaggatgcagcacttgacacatttgcatctatggtagcagcagtccacgcaggaaaaattgatggatttacctgtgatatgccttctgccaaatctattttagtaagtaatccggatttaaagattatcgattttgagggcggtaccggatttgaggtcagcaatgaagagacagaccttggtatcccttgccagaaaggaaacacagaattagtagataagatcaatgaagtgctcgccggactttcacaggaggacagagatgctatgatggatcaggcagtagcatcccagccggtaagcaactaatatggaacagacagcagtcgaaaaaaaattcggaaaatatgtcatggcttctatgatcaccatgtttctccaaagcgcctactccatgattgacggtttatttgtcagcaatctcataggtgacacggcattatccgcagtcaatgttgcgtggccggtcattgcagtggtaactgcaatcggcaccggcgttggatgcggtggagccgtaattatgtcaaccaaacagggagagggaaagaacgaagagtcgaacattgtacgggcaaatgtcatccttgcattattggcatcaagtattgtggttacgattctttttctgattttactgacacctttgttaaaattaatgggtgcagagggagaacttttaaggttgtcgcagatttatggaagggtaatgctcaccggcggcgtgcttcagatcttatcctgtgggctgacaccacttctccggaatgataaccgggcggtcagtgccatgatgatcatggtgggcggtctgattgcaaatcttggactggattttgtttttatgtatatttttcatctggggatcggcggagcagcaggagcttccttgtgtgcgcagttgtttacgaccatcagttgcctggtcattcttggtacaaagaaaaccgatccgatccggttttcacagttcattataaggaaagaatactggaaaaagatttttaaaacagcagtttcaccgtttggaatatcgctgacaccttccctgttgatcttataccataatgtggcgtgcctgaaatttggcggtgaccttgcggtaaatgcttatgctctcatcagttccaccgtcggctcgtaccgtgtgcttctgatcggtgttgcagaggggattcagccactggcaagttatgcctatggtgcacatgattttcatgcgatccggaagataagaaacaaggcagtcatcacggcgattggggtgagtttcttcctatttatatttaccatcgcaacagcccggttttatccggtgatctacggatatgagggggaagcagcagaacttgggtatcatgcggtcatggtgacggcagcacagcttatttttacaggacttgtgcgtgtgacgaactcgtttttctattcggttggaaaagacaggtattccctgttcatgatttactttgatccccttattatgacgccgcttacgatcgtgatcctcccacggatttttggactggatggtatctggatcacggcggttgtgacacagtttattttaaatattgtggcttttggaatgtttgcaagtcacgagaaacagatgaggcgactggaggcaaaagaagatgcggtggcagatattgcatttgcaggaaaattacaatgaaaaacagattgactgatttaaaagtctacatatgaaaaggaacgtaactaagatggccggtacaccatttcagctacgttccttttcctttccctaattaaccgcgttcgtaaaaatactacgctttccatgaaaaacatggtctgttgaaataaaatgtttgtaatgtttatataataggaagaaactcctatcgaataaaaccaaaattatgtagattagaaatctgtcaggtcagcttttctcttctctaagaaggcacccattccttcttttttgtcatgagtatcgtttacaacaccgaagaggtttgcttccatttcaactgcattcttgatatccatatcgtaaccgttgttaatcgctgcttttgcaacagatacagcatagcttcctttagagatgatctttgctgccatagtttttgcagtttccattaattcttcttttgcaacaactttgttcactaaaccgatacggtaagcttcagctgcatcaatgttgtcacatgtgaagatcatttctttggcacgtcccataccaactaaacgtgcaagtctctgtgtaccaccgaaaccaggaatgattccaagtccacattccggctgaccgaagattgcattgtcagatgcaatacggatgtcacatgccatagcaatctcacatccaccgccaagtgcgaagccattaacagctgcaattgtaacctgacgcatgttcattaatttgaagaatggaacagaagctctgataccgaatgctcttgcttccggagctgtaaagtttaccatctcggcaatatcagcacctgcaacgaaagatttgaatgcgttgtctttcttgtcaggaccaccggttaagatcacaactttgatatcgtctcttccttcgatctctgttaaagctgtgtttaactcgtctaatgtctcactgtttaatgcatttaatgctgctggtcttgagatggtaagaacggcgatctcgttctctacatctaattttaaattgttgaattcactcacgataataccctcctgaatagattgataaaaaattaacaatacatgttatatctagagtacttcttttgggaggatttgtcaatatgaacgtcgataaactttttctaaaatctgtaaaaaatggaaaactgctccgtttacatatgggagattacttattataattagataattgtagaacttaaatttaggttgtgaaaataagaggattatcgcatgattacagactataatttagaaattttaatagaaccattacttacgtggtatgaaaaaaatgcccgtgtgctcccgtggcgggaagaggcgacaccgtaccgggtgtgggtgtcagagattatgctgcagcagacgagagtggaagctgtgaaaccgtattttgagagatttacaaagcgtctgccggatgtggcggctctggcagaatgtccggaggatgaacttttaaaactctgggaaggacttggctattacaaccgtgtgcggaacatgcaaaaggcagccattagcgttatggaggagtatggtggaaaacttccggcagattatgatgcattgttgaaactgaaaggaatcggaagttacaccgctggggcaatcgcatcgatcgcctaccagattccggtgccggcagtggatggcaatgtgttccgtgtcctgacgagggtgacggatgatgatacagatattatgaagcctgccttccggacattattggaaaaagaactcaaagatgtgatgcagggaatggagatgccgggcgcatttaaccaggcgcttatggaactcggtgcgacggtatgtgtgccaaacggagcaccattatgtgaacagtgtccgtggaaagaactttgtctggcaaaaaaagaggataagatcgactgtctcccggtcaaaacaaaggcaaaagcgagacgtatcgagaagcggacagtgcttgtcatccgtgacaacgacaaagttgcaatccggaaacgtccggcaaaagggctgttggcaggactttatgaacttccgaacattgaggggacttattcacaggacgaagtgataagtcttgtgaaaagtatgcatctttctccgataagggtacagaagttagaggatgcaaaacatattttttcccatattgagtggcagatgcaaggttacgtgattctggtggaagaagccggatttgcagagaatccggtaccggagaaagcggatgtcatgggacagcttatttttgtggatgcagaaaaatcgcaggaaaaatatgcaattccttcggcatttgctgcatatgtaaaatacatgggaatcaggcttggaaatgagaaattctgatgtcagaaacaaatttcctgttagaaaaagagggagccggtgcaatgcaccggccattcatatgaaaaagattgtgtattgaaagtgaagtaattcactattttctgggaggaaccttgcttactggttaagcaaggcaacctgatttactcaggtatgaaaaaagttctatgaaaaattttcttgttggcttaacttatgcttagagtataaagttgaattgtgtctatcgtatgatggctttgtgagaaatttgtaaataaaatatgaacaaaacgttcaaaaattcggcttaccgggaaaatttcgagggatatagcgcagattttacgaattttacgccttaattatgaacatatggaagaattaagaaaaaataaattggcttgcatggctaaaatatgtataataggaagtactgaatcagtacgaaaagtttttttatatcataggaaagtaagaggtaacgaaagatgtatgattgcatcgtgataggagctggaattgccggagcagcctgcgccagaaaactggcagaggaagctggaaagaaagttcttgtgattgagagacgaagccatattggaggaaactgctatgatgttgcagatgaacatggcattttgatccacgagtacggtccacatatttttcatacaggattagaggatgtctacgaatacctttccagattcacggaatggtatccttttgggcatgaggttgtggcaaaagtaggagagaagctgatcccggttccatttaatctgaacacgcttcatatggtttatgataaggagaaggcagaccgtctggagaaaaaactgatcgaagcttacggtgagggaagccgtgtaccgatcatgaagcttcgtgagaacgaagatccggacattcgtgagatcgcgcagtatgtctatgaaaatgtatttttgaaatatacaatgaagcagtggggacagaaaccggaagaaatcagcccggaagtaaccggacgtgtgccggtactggtatcttatgacaaccgctattttcaggataaatatcagggggtgccaaagtacggttttaccccgatgtttgagcacatgttagatcatgagaatattaaagttgtattagacacagactgcaaagaattattacagtttaccggagatcagattctttttgagggaaaaccgtttgatggggatgtcatctacaccggggcactcgatgagctgtttgactgcagattcggaagactgccataccgttccctggatttccattttgaacattatgatgaggattcttatcagggacacagtgttgtcaactatacagtcagcgaggattacacgcgcattacagagtttaaatatctgaccggacagaaagatacagacggaactacgattgtaaaagaatatccgtttgcatataccggtgcagagggtgagatcccttattatgcgattttaaatgaggaaaatcaggcactgtatgaaaaatacaaggcacttaccgcaggacttccgaagttccatttattaggaagacttgcagaatacaaatattacaacattgatgccatgacgaaaaaagccatggaactggcagatgccattatgaatgaataagaaagggtgtaattataagtcattcaataattacgagaggatatcgttatgaaattacttacatttgctattccgtcttacaattcccaggactatatggagcattgtatccagtcgctgcttccgggtggtgatgatgtggagattctggttgtggatgacggctcaaaagaccgcaccgcagagatcgcagacgagtacgaaaaaaaatatccgggaatcgtgcgtgcgattcatcaggaaaacggcggacatggagaggctgtcaatgccggaatccgtaatgctacaggacttttttttaaggttgtggacagtgatgactgggttgactatgaagcatacatgaagattcttggaaaattgcgtgaacttgccggaggagatacggtattagatatgttcattgccaattatgtttacgaaaaagagggcgcaaagcacaagaaagtaatgcgttacagctctttaccgcaggataagatttttacatggaatgaagcaggaagatttcacaagggacagtatattttgatgcattcggttatttaccgtacacagcttctgcgtgattgtggattagaactgccaaagcacacattttatgtggataacatttatgtgtacaagccattgccgagtgtaaaacatatgtattacatggatgttgatttttaccgttatttcattggacgagatgaccagtcagtcaatgaaaaagttatgatcggccgtattgaccagcagatcaaggtaaataagatcatggtagatgagtttgacctctggaagatcccaaatccgaaactgcgccattatatgtttaattatctggagattatcactgtgatctcgacgatcatgctgatccgttccggcacagaggagaatttagagaagaagcgtgaattgtggaaatacatcaaagaccatgatatccgcctgttccaccatttgcgaaatggtattatgggaaatgcaatgaaccttccgggcagaggcggcagaaagatttctgttgcagcttataaactttcacagaaaattgttggatttaactaaggacgtggtgaaaaatgtacgttagaagatcaaaaatggaagatttgccggcgatgttagagctttatgcccaggcaagaatttttatgcgtgaaaatggaaatccgaaccagtgggatgaaaattatccatcgagagagttattggaaaaggatattgcctttggaaacagctacattgtagaagatgatgagaagaaccttgcagcagcatttgcttttataaaaggcgaagatccgacttattacgggattgaggacggcgcgtggctgaatcaggaaccgtatggaacaatccacagacttgcaggaaatggcatgtatcatgggattgcaagcggctgtatcggctggtgcaaaagccagattggaaatctgcgggctgacacccatgaggataataaaatcatgcagcatttgttggaaaagaatggcttcgtgcgatgtggaatcattcatcttgcaaatggggagccaagaatcgcctatcagtttgttggtgagaatccagattaccgtgagaataatccgcagccagcaatgaaccagaatcattcgaactgcaacggacagtccgtgatgaaccagaatcagtcaaatttcaacgggcagccggtgcaaaatcagaactggagtgtgaagaaggtggcagactctactgaaaaagggtttggaattgcttccatggtgcttggaatcattgcattggtattgtttttctcatttgtgaatatcccgcttgccattctttccgttatattcggaatcgtccagttgacaagaaaggcaccgaagggaatggcgatttcaggaatcgtgatgagcacgatctccatgtttttacttgtgatcttctgggcatttgtttttgtctcggatgccagaacagaaagcatggataacagcacttattatgaaggatccgaaaatgatgatgtatccggtgattattatgatggcttatatgaggggtatcagcagggatacaaagatggctattatgatggctactatggctatacgccggatgaagaattctatgattatacaccggatgatggtttctttggttatcttccaaatgatgattcttataattttcatgagaagaacggcatatattattaataaagaaatgacagccggggaaaacgtttgagacagaaaaacaatggaaaacaacaattcattataaaaagagcagcaggatttctgctgcttatttttgcatttacagggatcattggtatttgcgtgggaaaaaaggacaataggataagagcagacagtgggatggagacggagagaatggcagaagagaacacgaaagcagcgtcaggaaaaatcaaagaagaggaagttaagaaagtggctttgacatttgatgatgacgttataataggactaagtcaagagattagctataaagaagcggtttctatgatttagtcctattttcgctattctaaggagagtagatagggcagcgctgttatattaaaatcttatagtgaatagccgggatctgtcaatattagggatattggctgatgtcgttatgaccaaagcagggctaaatctaaattccatgaaaatgggatacttgatttagctctgctttaattgttatgggctttagcctgttgagtgcatcggagtttctcccaacggagaaatggagatgtgcgaaacagtaaaccacctgctatgcgggtggtgcaacaaatttgttatacaaaaaaatcacctttccgctaaaatagagttgttcaggctactatttaacgaaaggaaaggtgattttaatggcaaatcaaacaaattctatggcacatacaaaatggatgtgtaaatatcatattgtattcacaccaaaatacagaagaaaagtaatatacaatcagtacaaagaagatatcagagatatcatcaaaacattgtgtaaatacaaaggtgtggaaataatagaaggacacttaatgccagatcatatccatatgttggtaagtatcccaccgaaatatagtatatcacagtttatgggatatttaaaaggaaaaagtgcactaatgatatatgacaagcacgcaaacttaaagtataaatatggaaatagacatttctgggcagagggatactatgtgagtacagtaggattaaatgaagcaacaataaagaaatatatccaagagcaggaaaaacatgatatagctttggataaattaagtgtaaaagaatacgaagacccttttaagggttgctagtaatacaaatgcccttttaagggcagcgacgagtcaaaggcattagtagcttgaacgaaagtgaaagccagcgtctttaggcgctggccggtaacaaaggcttatagccgctgagcaaaccacccgtttgacgggtggtactgattaccgagatatggtaaaatatgcgattttatgctaggataggtacattgggttagatgtcgtgaaagtgcgataaaacctaggaaaaataaggatatacaaggaaaaacgaagatatgcaagataaaataaaagtgcttttcatctgccacggcaacatctgccgcagcaccatggcgcagagtgtctttgcccatctggcggcggaagcgaacctggcagattattttgaaattgattccgcggcgacaagccgcgaagaaatcggaaacacaccacattacggaacggtaaggaaactcagggaagagaacattccactcatcccgcacagggcgcgtcagatgacgagaaacgattatttatactatgattatctgatcggcatggatactgcgaacatccgtaacatgataaaaatcgccggaggcaaggacagtcagggaaaaatctacaaaatgctgtcctttgcgggatatgaacacacgcacaggctgtcggaggcaggagatgtcgctgatccttggtataccggggattttgaggtaacctatcgggatgttgtaagcggctgcgagggttttcttgcatatttaaaagaacataacgaatttacattgtgatttcaaaggtcacatgctaatattatcgcataactgcacacgttacagccgagatatgttcttgctgtttcgcctgcaaaaaagaattgtcactaacaccaaaatttcattgaggtgaaagatacggcatgccataagggagagactgcgtcaatgtcatatgggcacagtttctattttgcgtatgaaatttttagctgtatcttcttcggaggatgcggctattttttttctttacaaaaaatacgttagtgaagaaaggagcaccatggaaacaagaattgcattaatcgggatcattgtggagaacccggagtcgatcgaggcgctgaaccatcttttacatgaatatggaaagtacatcatcggtcgaatgggaatcccatacagagagcgtgaggtaaacattatcagtgtggcaattgatgccccacaggatgtgatcaatgcactttcgggaaaaatcggacggttggatggaatcggagccaaaaccgtttactcaaatatcacaggaaaaaaataaacacacaaaaatagaggaaaagccgataaaaaccaatatgaatgaagaaattaaatcaataattaataaagtaaaacaaagccggaatatttcattggagcagttaaaacttttattggagataaatgatgatgaagatgtccgctttatacgtgaagaagcggtaaaagtatgccagaaaacctacggaaatcaggtacttatccgtggactgatcgaatttaccaatttttgcaaaaacgactgttattattgtgggattcgaagaagcaattcacaagcggaccgatatcggttgacgaaggagcagatgttagactgctgtgccagtggatatgaacttgggtttcgcacatttgtgctgcagggaggcgaagatggatactttacggatgacaaaatctgtgatctggtgagtgccatcaaagaaaaatatccggactgtgccgtcacactttccattggagaaaaatcaaaagaaagttacaaacgctattttgacgcgggggcggatcgttatctgctccgccacgagactgcggacgaggcacattacaaaaaactccatccagaggagatgtctcttgcgcatcgcaaacaatgcctgtgggatttaaaagaaattggctatcaggtcggctgcggatttatggtgggttctccgggacagacagtggaaacattgtatgaggatcttcagtttatcagggaactgcagccgcacatggttggaatcggaccgttcatttcgcagaaagacactccgtttgcggacaaagcgtcgggaacgatggaacagacattaaaattgctggcaattatccgtctcatccatccgcatgtgctgctcccggcgacaactgcgctcggaacgattcatccaaaagggcgggaactcggcattttgtccggggcgaatgtggtcatgccgaacctttcgccggtcaatgtcagggaaaaatacaagctttacgacaacaaaatctgtacgggcaatgaagccgctgaatgtcgttactgtatggaaaaccgtatgaaaagcatcggctatgaggtggcggtaagccgcggagactatatagaataaaatactgaaaaaaagattatcatcgaaaagagcaaaggagaagaataaatgtacaacgtgaagtctttaaaagcggaagaatttatctcagataaggaaattttagacacattggcatatgcagatgccaacaaagataatgtggaactgatcgatcagatcattgagaaagcgagagcgagaaaagggctgaaccaccgggaggcatccgtgcttttagcctgtcagatcccggaaaaaatagaggaagtttacaaattggcggagcagatcaaaaaagatttttatggaaaccgcattgtgctgtttgcaccgctttatttgtccaattactgtgtaaatggctgcgtctactgcccatatcatttgaaaaataagcacatcgcaagaaagaaactaacacaggaagagatcgtaaaagaagtgactgcgctgcaggatatgggacacaaacgccttgccattgaagcaggcgaagatccggtcaacaatccgattgaatacattttagagtgcatcaacacgatttacagtatcaaacataaaaatggagcgattcgccgcgtcaacgttaatatcgcggcaactactgtcgaaaattaccgtaaattaaaggaagccggaatcggaacatacattttatttcaggagacttatcataaaaagagttacgaaacacttcatccgaccgggccaaaacatgactatgcatatcataccgaagcaatggaccgcgcgatggagggcggcatcgatgacgttggacttggtgtgctgttcggacttgagatgtaccgctatgaatttgcaggacttttgatgcatgcagagcatctggaggcagtgcatggcgtaggacctcacaccatcagtgttccgcgtatcaaacacgcagatgatatcgatccgagcgcgtttgacaatggaatttcagatgatatttttgcaaaaatctgtgccctcgtccgcatctccgtgccttacaccggaatgatcatttccaccagagagagccagcaggttcgtgaaaaagtactgccactcggcgtttcacagatttcaggtgcatcgagaacaagtgtcggtggctatgccgaaggagagccggaggaggagagctcggagcagtttgatgtcagtgaccagcggacgttagatgaggttgtaaactggctcattaaaatggactatattccaagtttctgtaccgcatgttaccgtgagggaagaacgggggaccgttttatggcattatgcaaaaatatgcagatcttaaactgctgtcatccaaacgccctcatgacgctgaaagaatatttagaggactacgcaagcgaggaaacaaaaaaactgggtatggaactgatcgaccgtgagctggagaaaatcacaaatccaaaagtaaaacagacagcttacgaatacattcatgatatttccgaaggaaaacgtgatttccgtttctaaaaatagtacaaacatagaaaggacaccagaaatggcaacattaaatgaaacaccatctgcaaaccggctgcacatcggcatttacggtaagacaaacagtggaaaatcctctctgatcaatgcgctgaccaatcaggaagtctctattgttgcagatgtggcaggaacaactaccgatcctgtatacaaaccgatggagattcatccgctcggagcctgcgtgctgattgacacggcaggtttcgatgacacgagcgagcttggcacaaggcgtgtggaaaaaacaaaacttgcagcagaaaaaacagacattgcagtgatcgttctttcagcggaagaagcggttacatgcgcagacgaacagggacagatacaggacgaattgaaatggtaccgtttttttcgggaaaaacatacaccagtcttatttgtcataaacaaagcagatcaggatgaagaaaatgcagcccgtctggcggagatgatttacgaggaagcaaaagaagatgcagtcatcatcagtgcaaaaaaacacaccgggatcgaggagttcaaaacaacactgatccgtcttatgccggaaaattttggcgcggaatacattaccggaaatctggtggaagaggatgatctcgttttgcttgtgatgccgcaggatatccaggcaccaaaggggcgtctgattttgccacaggtacagacgatacgtgaactgctggataaaaaatgtctggtcatgagtgtgaccacggacaaatttttgacagtacttccgctgcttgccagagcaccgaaactgatcatcaccgattcacaggtgtttggatatgtttatgagaacaagccaaaagaaagtatgctcacctctttttccgtgctgtttgctgcttataagggagagttgccttattatgtccagggggcaaaggcgattgacagcctgacaccggattcgaaagtcctgattgctgagtgctgcacgcacgctccgttaaaagaggatatcggacgtgtaaaaattccccgcatgttgaaaaagtgtgcaggggaaacgctgactgtggatattgtaagcggaacagattttccacaagatctgagtggatatgacctgatcattcagtgtggggcatgcatgtttaaccggaaatatgtgctgtcgcggattgaccgagcaaaaaaacagcaggttccgatgacaaattacggtgtaactattgcacatttgacgggaattttagataatatcagcatgccttaagaggtaaataataatgagttaagggaatttcaatgcagcacagatcaaaaaagataaaaaaatcatttttcattattttagttgttttaatagtattgtctggcggttcagcgatatatctcagcaactattatcacagcgtcgatgtggaaaaatatatgaacggttcatgggaagtttcggtcgaaaaatttgataaaggctggttttttgacggagcgggagaggagaaagccctgattttttatccgggagcaaaggttgcgaccgaggcatatgcaccgcttatgtatcagcttgcagaaagtggaatcgactgttttctggtcgacatgccgtttcatatggcgtttttcgggatgaaccgcgcggaggagatcatgcaggaatacaattatgaagcgtggtatcttggcggacactctttgggaggcgcgatggcagctaattttgcggcagactatgtggaagaccatacagatggaatccgtggactactcttattggcagcgtatccgacaaaagatttatcgacttctgatatgtccgttgtcacagtttacggaagcgaagatggcgtgctgaatatggataaaattgtggcaggacgggaacttatgccacaagattataaggaagtctgcattgagggcggaaaccatgcacagtttggaagttatggagcgcagaaaggtgatggaacggctgcgattcctgctgaggaacagtgggcgaggacggtggaggtgtttgttggcgatgagtctgaataacaagccatgcccattcggaatccgctgcgctacaagccgagccagctcgaatccgctatgctccttctcgctgttggggctgtcgcccaataagaataaaaagaaaagatgacagtctggtgaataaattccccattctgtcatctttcctttttatccttactcggcttgtagcttatccaaagtatctatcaagtaatcccttaagggctttgccgtgtctagcctcgtctcttgccatctcatgaacagtgtcatggattgcatcaagattgtttttcttagcgcattttgcaagatcaaatttacctgcagtagcaccgaactcacagtcaactctccatttcaggttatcttttgtagtagctttcatgtttggctctaagtcctcacctaacaactcagcaaattttgctgcatgttcagcctcttcgtaagcagctttctcccagtaaagaccaatttccggatatccctcgcggtgagcgatacgagccatgcaaaggtacataccaacttcagagcattctccttcgaagtttgcttttaactgatcgaagatgtatttcttgtcttcatcgctgatttctggattgttttttactgtttttgcgtaaacgccatattcatgttctgcagcaagtgtaagatctccttctacttttttgaacttatcagcgcctacatgacagactggacactctgctggtgcagcatctccttcataaacatatccacatactgtacaaacccattttgtcataattttgttctccttttcttatttaaattttatttagcttttgataatagtaactattactgattttaatttaaaaaatatattttgtcaatactttttcttatattttttatagaaagctgtatagttcgcagaacaactggaacggtaccgttaactgttctttttacagtctgcgcatttcccataaaaatatgtaatatgaccttcaatttcaccgtcaaatccctgatttgcaaggacattgatatgatccagaccatctacggaaagatctaaaacactgccacaatgtttgcagataaaatgataatgtggagccgaattcccgtcaaaacggtcaggtccgataccggtcgataatttctgaatctcaccgatgtcagaaagtaatgacagattacggtatacagtgccgagactgatattcggaaactcttctttgatgccgaggtaaacagtttcagcagtagggtggtcatatctgccggcaaggaaggtcttgattgcttcgcgttgtctactgtattttagcatgataatcaccctttctttttaataatagtaattgttactgatattataatagcagagaacactacttctgtcaagaataaagaagataaatttaagcatttttgtgatcactcagccacgcttcacaatgtaagtttttaaaaaaccacacatatcataacctgtaaatgaatatatatagtagcaacaaaataaatgccgggagcatccgatggcaggaatcaaacgttttattacatatatatatgcatacgaaaatggaacaaaaggaatcaacgcgggatttgcaaaagtggagattaggggaaatgaatgcaggattgaagtgcatctgcgtggaacaccaattcggatgggaatggatcaggtatacctttttaaagtagagggagggcagatgcttgcgttcccgatgggagagatgaggatgataaaaggaagcggagattatggaacaattataaaagcagatcagattggaggatcagaatactcgtttgccgagatggatggaatggtttttgcaggagaggaaggcgcgattgccatgacacgctggacggaaggagagccatttgcagtaaaaacagaaaatatcaggttgtgggaaccgccaagatttgacgcgggcgagacggaaaatcaaaaagaaaataagaaaacagagaatccccaggaaaaagtgacagcgaaaaaaacggaaaatcttgcagccgaaaacgaagaaaaagctgcagaggagcttcatgcaacggaaatgccaatgcgcaatatttttccgaagtttgtctgggtggacacgtgggagcggttcaaaaacatgtatccctattttacattgccggaggataaaaatgtggagtgtgtgcgcattgaactgaaagacctgcgtgaactgccgcgaaaatactggtatcttggaaataacagctttttgctgcacggatttttcaattaccgctatctggtgttgggaaagctcgaagaggacaaatggtttatcggtgtcccggggatttatcagcagcaggagcgcgtgatggcagcaatctttggcttcccggagtttatgacgaccgatcacatcaaccagtttggctattggtatcacacgttagatgaataatacaggagaataattgagagggaactgtccatttatgaatggatttcatcgggatttaagatagcgtagcggatgtgattttcccattttccctgaatgagaatactgtcgcgctcaattccttcctcgaaaaaacctgtggcatgcagcaggtttctggaaggcgtattttcaggcatgcagcgggcaaagattttgtgaagcccgagaccataaaagccgacagacagtgccatagacagagcttctcgggcatatccatgatgctgataagacgcatcgaatttatagccgacctcactcgtgaaataaggcatttttataatattgtgcagacagaccgtgccgatgatggtagatggatcttctttcaaaaaaacataaaagcgcacactggaaagcttgagcgcaagttttaactcgcatctggcgagcgtctgttggaaatcgagtgtgtaataattctcaggggcggttggttcatatttttcaaagcaggagcggttacgatataaaaaatcatggatttcccgcagataatccgtggagggaagccgtaaaattaatcgctctgtttcgtaggaaaaagaaagcccggtgggcagttgtgtgtgattctgcataaaaacctcgaatggaaaaattcttatataacattatatacgacaccacaaaaaaagcaaaaatatttctatggtagtgatgcgataaatagtgtatcattgtatacagagtaccagaacaggaaaacagaaaaatgaaaatgacgcaggacgaaaaatatatgaaggcagccatccgcgaggcgaaaaaagcatatgccctggatgaggtgccgatcgggtgcgtgatcgtgcagaacgatacgatcattgcaagaggatataatagaaggaataccgaaggaaatacattggcacatgcagagctgaccgcgatcaaaaaagcgagcaaaaagacaggagactggcgcttggaggactgcacaatgtatgtgaccttagagccgtgccagatgtgcgccggagcgatcgtgcagagccgcatgaaaaaagtggtcattgcaacaatgaatccaaaagcaggatgcgcaggctcggtgctgaatcttttgcaaatggcagaatttaatcatcaggtggagattgaaagaggagttttagaggaagagtgctcgaaaatgctgtctgattttttccgggagctccgggaaaagaagaaaaaagacaaagtggcagaacagaaaacagataatagataacagaatccagacggactcttgacaatgaatagtgttataagctatacttaaatctccgagcagccggggtggcagcggtaccctgaaccagcaatccgctatagctggggtgatatcaaactgagggttatctctttgcggagcagcccttcataagtggcgttgacgtatgggtcttacgcaacaggaatttacgaaccgggtcaggtcaggaatgaagcagccctaagtaaaagctcttgtgtgccgtgagggtgcctggaccgagttaactgtggaggtaacgtccgtggactggattcgaagggcgatgctcggatttaaaatttaagaacagaaattggaaagagccgcagcagtcatactacgactcttttgttataaaaatagacaatcgcgaaactctgatttagcgtatgaagattgtgaaaaaattaacatacataaaggagaagaaaaatgtgggacaaagtaagaagaaagatttttgatgcgtgcgatctgatggacatgatcatggcagcagtggttgttgtaggaattttaattgctaccattggaatttttccacagataacagagctgtggagccatagaacagacacagtcgcatttctgaaatttttagatgcagtgctcggcgttgtcatcggcgtggaatttttgaaaatgttatgtaaaccaaatacagagaacatcatcgaagcacttattttcgtgatcgcgcgtcacatgatcgttcagacgacgacagcaggggaagatctgatttccgttatcagtatctgtatgttatttttgttccgccgttttatgcttgcaacaaagccggacaaggaacatcatgttccggattttgtgaaagcaatcaaggtagcgcagtcctctgattttcaggaagcgctgaaagagacagacgaacatgagacaatttctcagcagaaaaaataaaactgcatttatttgaatacaaacattgaatttccaaaaaactgctatataatgtaagcatgtcacggcgaaaaacgccagaaatcgtgtttatccggtacatagacgcggttttagagaaaaagaaaagtgaggaaaataaaatgtttggatttggtcagttaattgacatcttgaaaaagaacccgaaaaaaattgtttttacagaaggaaatgatcctcgtatcttagaggcagcttccagacttcttgcaagcaatttcttacatccaattttagttggtaacccggatgagattgcaaaagtagcagaggagagcggtttcaatatccgtggagcagagatcatcgatccaatgaagtatgacagatttgatgagatggttgagatgttctgtgaacttcgtaagagcaaaggtgttacaccggagcaggcaagaggaattctttctcaggcaaactactttggtaccatgttagtaaaaatgggagttgctgattcccttcttggtggagcaacatattccacagcagatacagtacgtccggcattacagttgatcaaaacaaaaccgggtaacacaatcgtatcttcctgcttcatcatggtacgtccggcagctacaggcgagaacgaagtacttgcaatggctgactgtgcaatcaacattcatccaacagaggacgagttagtagagatcgccggtgagacagcagagtgtgctaagattttcggtatcgatccaaaggttgcattcttaagctactcaacacttggttccggtaagggcgaggatgttgacaagatgcgcaacgcagcagcaaaagcaaaagaaaaatatccagagcttccaatcgaaggagaaatccagttcgatgcagcagtttctccacgtgttgcacgtacaaaatgtaaagattccaaggtggcaggacatgcaaacacatttgtattccctgacatcaatgctggtaacattggttacaagatcgcacagcgtcttggtaacttcgaagcttacggaccaatcttacttggcttaaatgcaccaatcaacgatctgtcccgtggatgtaacgcttctgaagtatattctatggcaatcatcacagcagcacttgcttaattgcaattgatcggaacataataataagaaagaaccgtatgcgaagagcgtttgaaagaatgttttcgtgtgacggttctttttttgttatggcgacgaccgctaatcggagcgagattcgcagagcatatctcgtctctgggatcggaaacacttgaatcgtgaaatggtattttgaatttatatatgattctcgcagactggatcatataattagaatacgtggatgaaaccggaaaagtatcagataatacgtggataactatgtggataatgtgaataagtcggtgaatatagataaataatattaattgttatacaattaaaaagaaatacgaaaagaattataaaatggaaatatatctttttctttgattgtatagtagaatatgtgtgcaattcacataataggaaaaaaagatttgcagaaaataacaaatgaatcaaacagaggaaaaaacaatgtttaaaaatgcaggacgtgtaaaacgcacaatagaagaatattttgtacttaccgtggcaacgcttattctggttgtcggtgtgtatgtattcaagttcccgaataacttttctttcggtggagtgactggtattgcggtcgttttgagcgccattatgccgacaacccctggaaatatcacatttattatcaatatggcactgcttgtgctgggatttatttttcttggaaaaagttttggaatcaagactgtctatgtcagtgtgctgatgtcagttgggttaagtgcagcggagaaatggtttccaatgtctgcgccactcacctcacagccggtgctggaactgatctatgcgatcgtgcttccagcggcgagttcagccatcttatttaatgtcggagcttccggtggtggtacggatattatcgccatgatcttaaagaaatacacgaaactgaatatcggaggtgcgctgtttctggtagacctgtttattgtacttgcatcctgccttgtctttgatgcgcagacaggtctgttttccctctgcggacttctggcaaaatcactggtggtcgacaatgtaatcgagagtattaacatgtgcaaatacttcaccattatctgcaatgatccggaaccaatctgtgagtttatcacccagaagttaaaccgcagtgcaacggtatatcatgccgagggtgcttatcagcataacgacaaagcagttattctctctgttatgaagcgaagccaggctgtggaactccgtaacttcatccacgaaaaccagccgtccgctttcattgcgatcaccaacagcagtgagattatcggaaaaggtttccgcgggttgaattagaaaaccagaattgcgaaaaagtccgaaagtttgcggacatagggaaattatgctaaaatagacggcatataagatgaatgaatttgacggaaatttgttcaaaaataacaggttttatcgaacactaaaaggagagataaaacaggagaaaacaggagaaggatttcatgaaaatttgggaagatgagaagcaggtgtatatcagagcgagcatggagcgcaatacaccggaacagaacgcgaagttaagggggcgcttagaacagatcgactggtctattttagaacatatcgagcgaaaagaaacggtaaacgaacgcggtgtgtttgcaccgttagaagcggtggaagttccggagatcgagtcgcgcagggatgaatttaaggcagccggattagacgctatccgcgcaggaaaagtaggggcagtgcttttggcaggaggtcagggaacaagacttggacttgacagaccgaagggaactttaaatattggcgtgaaccgggaactttatttgtttgaacagcttttccgcaacctgatggatgtgacggacgaagcgaaagcatatgttccaatgtacattatgacaagcaatattaataataaggacacagttgctttttttgaggagcacaattattttggttatccgaaggattatgtgaagtttttcgttcaggaaatggttccggcgtgtgaccatgagggacgtgtttatatggaatctgacacagaagtggcaatgtctccgaatggcaacggcggctggtttggttctatggtgacggcaggactgttagatgacatccacgagagaggattagaatggatcaatgttttcgcagtggataactgcctgcagagaatcgcagatccgttatttatcggtgcaacgattgtttccggctgtgagagtggtgcaaaagtagtgcgcaaagcggcaccggatgaaaaagtaggtgttctctgtacagaagacggaaaaccttccattgcagagtattatgagatgacagaggaaatggcaactgcgagaaaagaaaacggagatctgctttatggttttggcgtaatcctgaattatcttttctctgagaagaagttagagcagatcgcagatgcgcgtatgccgatccatgtggtggagaagaagatcccacatattgatatagagggaaacccggtaaaacctgagcagccgaatggctacaagtttgaaacgttagtgcttgatatggtacatatgatggatgactgcattccatatgaagttgtgcgtgaaaaagagttcgcaccgatcaagaatctccatggtgtcgattcgctggatacggcacgtgagttattaaaaggctgtggagtggagctgtagatcacagcaattttcacagaggatttacaaagagagcaaatagctttggaaaataagcagaaaagaacatgaaaacagcgtaaaatgggcgtttggtggtgatactgccagacgcctgttttgtgcaaaaaacctaagaaaatccaaggaatttcgagaaaaccactgaaaaagcataaaaatagccaagaagacataagactcaaaaaagaatattgaacatattgcacaatgaatacagaagaattttcaagaaagaaagaagtattttatatgtttttttatagggacggttgctataatgcatcatgtaacaagaagttaccaaatacattaagggaggttttcttatatgaaaaagaaagtagttagtgtaattcttgcaatgacaatggtagcatccatggcaatgggatgcggaagcagttctgataaaacaacatcagacagcacaacaaccacaacaaatgatgcagcagcatctacagaggcatccgacgcagcagacgcaacagcagatgcagcaagcggagatcttgctgacaaaaaagtcggcgtatgtatttatcagttcgctgataacttcatgacattattccgtggagaacttgagaactacttaattgaacagggattctcaaaagaaaatatcacaatcgtagatggtgctaacgaccaggctacacagacaaaccagatccagaacttcatcacacagggtgttgacgttttgatcatcaatccagttaactcttcatccgcagagacaatcacagatatggttgttgaagctggtattcctcttgtatacatcaaccgtgagccagacgcttctgaggagcagagatgggctgataacaactgggatgtaacatatgttggatgtgacgctcgtcagtccggtacatatcagggcgaaatgatcgctgatcttggtcttgatacagttgatatgaacggaaacggtaagattgactacatcatgatcgaaggtgacccagagaacgttgatgctcagtatcgtacagagtactctatcaaagctcttgaagatgctggattagaagtaaactgcttagacgatcaggttggtatgtgggatcaggctacagctcagcagttagtagctaactccttaagccagaatggtgatgacatcgaagttgtattctgtaacaacgacgcaatggcacttggtgctttacaggcaatcgaatctgcaggacgtactgtaggcgaagatatctacttagtaggtgttgatgctttatcagaagctcttgaagatgttcttgctggaacaatgacaggtactgtatttaacgatcacttctcacagtcccacagtgcagcagacgcagctatcaactacttaaatggtactggaaacgagcactacattggttgtgactacgttaaagttacaaaagacaatgctcaggaaatccttgacatggttaaataatcagccattgtaacattggaataaaagtaaaatgaaaaaaagcggtgcgggtgtttatatggcacccgcacttgtcttgaaaaagctaacacaaaacgatcttaatagatttgataacaaagagaaatatgaaaatgtcatgtatttgaaacagaagaagtaatatggtaacaacattctaaatattgacattaaacagatttaaggtctgtatcaacataaaataaaacaggtaaaacctgaatttgataaaggaggagcaaaatggctgaatataaactggagcttaagggtgtttgcaaatctttccctggtgtaaaagcgttggataatgtacagctttcgttaagaccaggaacagttcatgcactgatgggtgaaaacggtgcaggaaaatccactctgatgaaatgccttttcggtatttacagaatggatgcgggggaagtcattctggatggtaagaagatcgagatcaacaatccggatgaagcaatgaagtatggtattgcaatggtacatcaggagttacagccggtacctgcaagaagcgtggcagagaacctttatttaggacgtttcccaaccaaaggattcggaccatttaagatgatcgaccacaaaaccatgtacgcagagacagagagatggttaaaagaggtaaaaatggattttgatccaaaagcacagcttggatctctttccattggacagatgcagtccgtagaaattgcaaaggcagtttcacagcaggcaaaagtcgtgatcttcgacgagccgacatcttctctttctgataacgaagtagaagcgctgttccgtatcatgaatgatctgagggacaagggcgttgcaatggtttacatttcccacaagatggatgagatcaagcgtatcgcagatgatatcacgatcatgagggatggtacctatgtaggaacctggccggcagcagaactttcaacagaccagatcattgcaaagatggtaggccgtgaacttacgaatgtatatccaccgaaggagaacaaaccgggtgaagtcatcatggaagtaaaagacttatgttcgatccatgaaaaatcattccagcatgtaagctttgaattgagaaaaggtgagatccttggatttggtggactggtaggcgcacagagaaccgagttgatggaaggtatttttggtatccgcggtatcgcatccggcgagatttatatgcacggcaagaaaatcaggatcaaacatcctattgatgcaatgaatgcaggtatcggacttattacagaggatcgtcgtggaaatggtatcttcggatgtctttccatcaaagataatgtaggtgtctctgtatacaataaattccttaaagcaggatttgtgttagaccacaagaaaatcaatcgggttgtggatgacagcattaagaagttaagcattaagacaccaagtatgaaggaacacatcgcaaacctttccggtggtaaccagcagaaggttatcgtagcaagatggcttgcaaatgatcctgacgtactgatcatggatgagccgacccgtggtatcgacgttggtgcaaaacatgagatttatgagatcatgagtgatctggcaaaacagggaaaagcaatcattatgatctcatcagaaatgtcagaacttcttggtatggcagacagaatctgcgttatgtgtaacggtaaacttaccggcgagatcgatcagccggaagagatgactcaggcaagagtcatgggcttcgcaaccaaattctgatagaggaggacaatagaatggaaaagacaaaacagcagaaagcaaaagattttattatcaacaatggcgttatcattgtaatgtttattctggttatctacaccggattgacatctgataacttccttacatcaaacaacttaatgaacattttgatgaacatgagttcacgacttgtcatcgcccttggtattgcaggatgtgtaatcaccgcaggatgtgacctttccgcaggacgtatgatcggtttcgcagcatgtattgccggtacattattacagcgtattgattattccggaaagttcttcccggatatgcagccaatgaatgtatttctggcattgatcgttgtcatggcaatctgtgcagcattcggtagtatcacaggtttcttcatcgcttacttaagcgtaccaccattcatcgctacactggcaatgatggaaattgtttatggtatttctttgatctacacaggagctacaccacttggtggttatgtaaaatcctacacagatattgcaaacggtaaattccttggaatcagctggctgatctggatcgcaattgtggtagcagttatcacatggttcatcttcaacatgacccgtcatggaaaatatatgtatgcaattggtggtaacccacaggcagcagaagttgcaggtgttcctgtaaaagcaacaatgatcttaatctacatgaaagcagcagctatgtatggtcttgcaggtttcatgcttggcgcaaaagccggtggtgcatccgttaacttaggatatggttacgaaatggaagcaatcgcagcttgtacaatcggtggtgtatccgttacaggtggtcgtggtaaagtttcatccgctatcgtcggtgttgctgtattcgagttattgaaagcagcattacagtacttaggagtagatgcaaacgcacagtacatcgcaattggtatcgtaatcttcgtagcaatctcacttgatatcagaaaatacgttgctaagaaataatttttgaaacatcatatgatttatattataataatagcggctggaatttttcagccgctattattacttaagggagaaaaaggatgacaacacagacgattttagaacaggcagggattccaatacttttatttgtgatctgtatgtattatggcttgaagcttatcattttgcaggatgtttcaaccattcgtggaaagaataaagaaccggtgaagaatgaaaaagaatacgcgaaaaagggtggggcgctgattgtattttttggtcttgcaacacttgtaatgacatttcttctttttgtcaatctgtatgtggcactcgcgcagatcgtgctgtgcaccattattttcggtgttttgtggaaaaagatgaatgacaaatacggtgcataactagaagagaaaaagaataaaggaacagaaattatgaaccaatatacagttttacttgtagatgatgaggaagaagtttttcaggtcatcatgaaaaaacttgactgggagagcatgggcttttccattgcaggttatgccagaaacggtgtggaagcgcttgaaatggcggaggaattgcagccggatgtggtgatgacagacattaagatgccatatatggacggactgacactctgcaagaagttaaaggaactctaccagaaagtgaaagtcattattttttccggatttgatgaatttgagtatgccaaagaggcaatcaagatcgaggcggaagagtacatattaaaaccgatcaactccaatgagttaaaagaagtgttcgagcggatcaaggtgaatcttgacaaggagctggatgaaaaaagaaatatcgacaagctccgtgagtattatatggaaagtcttccggtcctgcaggagaacttttacacttcactgatcgaaggaagaataccggaggaacagattgataaatatgtgaaaaactaccagatcaatctgacaggaccttattatgtggtaacggttttacatatcagcacgacgaacccggaaaacgtaccgatcgatccgttccttttgactatttccgtaaaaaagctggcggaagaacagctgacggaaaagtggaactgtaaaacagtgacttacctcggagatattcttgtgattgcacagctttccgatgtggagagtgtcacacattttaccgatgatatggaccggttctgcaaaatggcaaagcgtgtctgcaaggcaaccgtcacagcggggatcggacatgtgtgcaaccagctttcacagctttctctttcctatcatggagcaaagaacgcgacttcgtaccgcgttttatatggaaatacaagggcaatcaacatcgcagagatggacccgcaggagagtgtggatgaacactgggaagaaccgtacatccagaagattttgaaaaaagtaaaaatggatgagcagcagccgcttgaggaagcaatcacagagtttacagcgcagatggcaaaaacaagaatgtccctgcagaattaccggattctggttatggagctgatcgcggagattttccggtttggaagcaataaccagatcaacatggaggatgtgtttggcagcaataatgacgtatacaatcaggcattgcagttagaatccacggacgcgctaggcgcatggctgaaagaaaactgcatgaagatgcagcgtcaggtgacaaatgagcgtcaggatacgaccaaatcctttgtgaccaaagctgtggaatatgtgaaggagcattatgcagaccaggaactgagcattgagacgatctgcagctacctgaatgtgagtgcggcatatttttccactgttttcaagaaggaaaccggaaaaacatttatcaattatctcaccgattaccgtatggagcaggcggtggatctgcttctgacgaaagacgagaaaacctatattattgcagaaaaagtgggatattccgatccaaactatttcagttatgtattcaaaaaacaattcgggatgtcaccatcaaaatataaggcaggcaagttaggcgaaaagtgaaaacaatagaaaaattttaccggaaaatagcagaatacattgcaaaacgagtcaaaccccagacgatacagtttacgatatcggtttcttttaccattatctctgtatgcagtatggggattcttggcgtgacactttataatcgttttgttaaccggatggaggagatgacgatcgaaagctcggagcagcttttgaaccagacggcgatcaatttagagacatatctgcgtaacatgcggcgaatctcagatgcgatgtattacagtgtcattaaggacaaggatctggcggttgattccgtggacgaggaaatgaacctcttatatgaggcaaataaggataacctcatcagtatcgcgtgttatacgaatgacggaaagctggtggctgcagcgccggtcacaaacgagaaggataattccgatatcgtggatcagcagtggtttgtcaatgcggtggatcagatggagaaccttcatttttccacgccgcatgtgcagaatctgtttgacaatgcaacgtaccgctattactgggttatttctttaagtcgtgcggtggaactgacgagcaacggaaactccacgcttggcgttttgctggttgatatgaactacagcagcattgaacagctttttaacaaggcgaataccgataactcctctgaatatgtgtatctgatggatagcgatggtgagattatttatcacccgaaacagaaactgatttacacgaatctctatgaagaaaataatctggaagcggtacattatgatgatggatcgcatcaggagatttttcagggagaaaagagactgatcacggtgaagaccgtcagctataccggctggaagatcgtgagcgttgtgccgatgagcgcttttaatatgggactttacggcacgcggatgttcgtgattatgcttatggcactgtcgattttgacgatcattatcatcaatcagcttgtgtcggcaagaatcgcaaaaccgttgcagcgtctgaatgaatcggtcaaagagtgggaatccggcaatctgaatcctactatctacgtaggaggatctcaggaagtagaacacttgggaaaaacactgcgttccacggtggagcagatcaaccagttgatgcatgatattttgtatgagcaggaagaaaagagaaaaagtgagttagatgcgctgcagtcgcagatcaatccacatttcttatataatacattggattccattgtgtggatgatcgagggggaacgatatgaggatgcggtctttatgatcacgcagcttgcaagcctgttccgcatcagtttaagccgcggaaaaacgatcatcagcattgaagatgagatcaagcatgcaaagaattacatgaacatccagaaaatccgttacaagaacagtttcgttgtagatttctcgattgatgaggagattttacagtgctgtaccgtaaaactggttgtgcagccgttgttggaaaatgcgatttattatggcgtggaaggtatggacggcgaaggcgagatccatgtgagaggataccggaaagaggacgatatttatatcgaggtgagcgacaacggacttggcatgccacaggatatggtagaacaattattgacggataacaaccgtgtcagaaaacatggttccggtgtgggcgtcatcaatgtgcacaaccgtatccgtctgcgttttggaaatccatacggacttgaaatcgagagtatgccggatgagggtaccacgatccggattcatctgccatacattccttatgaaccggagaaactcgaacttctggaaaatggaaagatgcaggaattaaaagggggagagagcaaatgaaaaagaatcagatttattttggactgctcatcttagccctgatcgtaaccattgtctggacttccatgggaatgttgggcgtgaacagagttgaaaaaacatacaatgtctccgtgatcgtgaacgacagcaataacgaccgctggatcgccatgcgggaaggcttggagcaggcggcaaaagataactccattcagctcaactatgtttcgacgggtgttttatccagcgaggaggaagaaaagacactgatcgagcgcgaggtggaaaacggggcagacgggatcgtcgtacagcttgtgtcgagcgaggatacctatgctgtttttgaaaaaatagatccctcaattcctgtcatgcttctggagacagatgccgtttccgagggagtgtattcggtgacggcaccggacaacctctggattggagaggcgctggcgcagacagttttggaagattatggaacatccatatctgacagaaaaatcggaatcctttgtggaaaccagaatcagttatccatgcagcagcggcttggcagtgtgcaaaaaatcttaaaggataagaacattgagccggcgtgggttttgtcggatatcggggaagatttgtcagcggcacttatcacaaagcaggcagaagacccggtggatattctgatcacgcttggcaatacggagacagagacagcggtggattacctgcaggcagacacgagttacaaaaaaacgtttgcaatctacggggaaggatgttctgaaaaagcagtttattatctggatcgtgacgtgattaagacacttgtagttccaaatgaatttaacatggggtatcagagcgtccacgcaattgcaaaacagcttcaatacagactttccgggtcagagagcacgacagtgggaagcattgtgatcaataaacagaatctgtatgatgaggaaaaccagaagattttattcccaatcgtacagtaaaaaggaatacgactgacagatgcgggcagcaaggagtttttgaaatataggagaggtatgaagaaagagggaaaagagcggatatgagaagcagaaaacagaggatttcgagtgcattgattgtggcagtgagcgcatctgcgctaatgggctgtcagatgccggagagaaacacgcaggtgaaaaatatcaaaatcggtgtgaccgtttacgatcagtatgatgcttttctttctcaattaatggaagacttgaatctttatgcggctgagaaagaggaggagaccgggattgccattaatgtggaagtgtataatgcggcgcagagccagacaacacagaacaatcaggtcgagtctatggtgcaggacggctgtgatattatctgcgtgaatctggtggatcggactgatccgacgaccgttattgatcttgcagagaaaaatgatattccggtgatctttttcaaccgcgaactggtggaggaagatttagagcgctgggatcagctttattatgtgggagcgaaagcgtttgagtctggaatgatggaaggacagatcgcggcggcagcttttttggacgatccttcggtggataaaaatcaggatggcgtgtatcagtatgtggtgcttgagggagaaccgggacatcaggacgcgatcgtgcgcacggaatattcggtgaacaccattgtttccagtggaatcgaagtggaaaagttaggctatgcgatcgccaactggaaccgggcgcaggcgcagaataaaatgacacagcttttaagccagaatggaagcaatatcgagttagtgattgctaacaatgatgatatggcagtaggggcgatcgacgctttaaaagcatcggacctaggcagggaggaatggccggtcgtggtcggaattgacggaacggatgtcggactggaagctgtgaaaaatggtgaaatggtcggcactgtttacaatgacaaagaaggacaggcaaaaggaatgttagaacttgcttttgcgctggcaacgaatggaagtctggatgacctgaatctggaaaatggaaaatatataagacttccttatgcaaaagtcggaccggatgatgtggacgagtatatgaaccgataaaatggagtggaaatttgaagacaattatttattttaaaggcgtttatgacacattggatctgtttacggatcatcttatagaagcatttgaatccatgggatatggaacatttgtgtatcatactgcaaatgaagaagtgagcaagaaaatgctgcttcgtttgctgggggagggaaaagcggagcaatatgcggttgtgacatttaataatctgggctataatttgtcattttttacacaagacgggcagacggaagtgacagaccatgaggaaggaaagatagaggagcacaatatatgggactattttcagattccatatatcgatattctcatggatcatccatttcattatgagaagccgcttcacaatatgccgcaaaccgcagtgatcctctgcacagaccgcaatcatgtgaagtatgtccggcgatttttcaaaaatatccgccagacaaattttcttccgcatgcaggtgtggaactgggacataagcataagcctttacaggaacgcagcattgatgtgctgtatgccggcgcacttccaatctacacggtggcaaaaatgatcccggatcttcattctattccggaggtaaacggggaagacctgatgcagtcggtacttggagatcttgtgcagcacccggaaaaaacaaccgagcaggcgattgaagcatatatacgatcggtgcgtgatgacatatcggaggaacgcttgcaggagattattgtgaaaatgcgtttcttagattcctatgcaacctcttttttccgcgaacaggcggtgcggattcttgtggagagcgggattcatgtgacggcgtatggtgtcggctggaaccagtgcgagtggagcgataatccttatctgacgtatggaggaaaagtgctcgcaccacagatcctgccgctgatgaacgattccaagatcgtgttaaatacgatgacatggtttaaggcgggagcacacgaccgtatttttaatggaatgcttgcaggggcagcagttgtgacggatgattcttcctatctgcgcagagaatttacggacggaaaagaacttgtgatgttttctctaaaagaactacagacgctgccggagcgggtattcgatttatttggccacatttcccacatgcaggagattgcggattgtggatatcacgccgcaaaagaggggcatacgtggaaaaacagggcagagtatatcagggagtgttatttggacgaatagaacatcaatatattttctcagaaaattttggtgagcggtttcgccggagcatggaaaaatggaggagcagagacaaatgcgtattttaatgtatcgctggaaggcatataattaccgggatattgaacagaccttccgtctgttggggcatacggtggataacatcgagcaggaacttggaaattatgatatcgatcctgcgtttgaagcaaaaatagaagcgatgatagaaaagaaccattatgatattgtgttcacggtcaattactttgcgttgatctccaattcctgcaagaaaatgggcgtaaaatatgtctcctggacgtgcgacaatccgctgatcagtatgtatcatgtttcggtgtttaacgactgtaattatatttttacctttgataagacaaactatctggaatttaaggaaatgggcgtgaaacatatctggtatctcccactcgcggtggatactaaccggattgatacgattttgcagaaatcagaggactgtgcaaaatatcgcggtgatgtggcgtttgtgggaagtctttatgagagaaactcatacgacaaaatcaaaccgacactcccggaatatctgcgtgggtattttgacgcagtaatggaagcacagttgaatatcagcggggcaaatatcattgagccgatgctgacaacggatatattagagcagttgcagcagcatttttcactggaaaagtcggaaggatctttctcggatcttggactgatcttccagacgactgtgcttggatttaaaatcgcagagatcgagagacggcgtgcattgatcgaactttccaaacatttccatgtgaatgtgtatagcaacagtaatgtctcggatcttgtgagggtgcagtactgtggctctgtggattattggagcgaaatgccgaaggtgtttcatgagtcgaaaatcaacctgaatttcacaatcccgaatatcaaaagcggaataccactgcgtatctgggatgtgcttggtgccggtggatttctgctgacaaactatcaggcggagattcctctttattttaaggaaggggaggatctggtctgctttgacggagtggaagatcttgcagaaaaaacggcatattatctggaacatgagaaggaacgcgcggaaattgcccgcaatgggtatgagaaggtaaaagaaaaccattcgtaccgaagccgcatagagcagatactggaaacaatagcataaaaagcgtagtagaaaatgttacgcagaataataaaaaagactgttacgatcatgacgaatgttcttacagcatttagctgtcaaagaacattcgtcattttttatttgctaaatagcgacatcacaaggggcgtagttcacaactacgccttttcttgtattcaccgacacatcgggtgtcggcaaaggaagtgcgcttggaatctcgatggtacccacacagttatagtgaatacggagccgctgctcccatacaccgttgaccttttctgcattgaacacttcgattttttccaccagttcattcagcatccggggtgtcagcttttttgctctggtgtacttgcgaaccagactgataaacatatccgttgtcatagttcggctgctctgcttttcgatttcggagcggagctgtttgattttctcggtcagctccttttgctcgtcctcatatctccgggacattctggaaaagcgttcatcag

SEQ ID NO: 14311 - DNA, 769 bp, Unknown
  gut microbiota DNA sequence
aacgtgatcacgtatatgcggatctgccctgcgttgtgaagaattttccatttgatcttatttgtcttatgtatgatgctttcacctacatataaatcgtcataccatttcatgcaaatcctcacattaaaagtacttgtggctgccccacaaattgtttttcttcaattccagatattcattataggctttttccaaaatctgcttttcattcgaaaatttcagcagatgataagcctcatgatatttataaaatccggaatcaacaaaatattcctcacgctgtggtttgctgtaataactgtctgccatcatcagataccagtgtacttccttctccacagtatcttccggcacggtaaatgtatactggctcttgccaatatacttgatgatacttgccgccgctcctgtctcctctagcacctcacgagtcgcagtatccttgaattcttccccttcttccacagttcctttcggaagaacccagccctcatatttattcttgtaattcttatataagagaagtatcttacctcgaaatattaccacaccgccacaacttgttgcttcgatcattgcaatacctcctgatgtggtttttgtttataagtataatacttttcgttttttcatgcaaccaataccgaaatatctttgcatcctctttactgataataggcgtcaaaaattttttttgcgatcggcactgcatactcactgcctgagccggaatcttccacgataatcgcaaccgcaatatcctctt

SEQ ID NO: 14312 - DNA, 5055 bp, Unknown
  gut microbiota DNA sequence
gtaatgctctccagcttcaaaatccttgtactctgttgagttgtctgtgtatgttactttgcttacgtctgtaggaaggtctgcaccctcaccaccaacacgggtaatgactaccatagctgtgtcggagaactcttttgcatttgcgatcatctcatctgtgtaagaatctgctgttggttctggtaatgtccaatcctgcgcccacataccaacttccggtctgtctgcacgatacgctgtgtagaaatcagaaagttctgtgttcagtttgaatccggcatcttctaatccctgaagtaaagatactgtcggatatgcatcagataatgctccggaacctgtaccgccgtaacatggattggttgaagcccatccaaatacgtttaaattactgtctgctgcaagtggaagtgtaccgtcatttttcaataatacgattccttcctctgcgatctcctgaacaagtgctgttgcctcgtcagaagtctcatctgtgattgctccatttcccattgcaagtgagatcatacttgacattggaatgaaacagattaaattaacaattactacaactgcaagtaagaatgcgatccatgcttccttgcgaaccagtttctttactggttttttcagtttcatgcatgcaactgtcacaacgattgcaagggctaatacaacgcctaatgcaatgaggtacggttcacatgaattcaggacgtttacaacgtcatccatgttaatagctaacatttctaaatcctcccaagatttatttttgtccgttccggactttgtatctatactctatcataaagtacttttcttatggagaatttgcataatctgcattttttttgcataaacggtattgcacattgtgagttttagacaaaaacaacgccatgttttcatgcacaatgtacaaaccatagcgttataaagcaaaaattgcgaatacttatccatacgtattctatttgacaccgttatccgttctgcactccgtcagatgcagtttttttcatcgggatcaaaatcttcagatcaaaccagttttcttttgtgtcaatactgactgcaccatcgtatttatttaccgtatagcggatactcttgattccataaccatgaaactctttttccttcttggttgtcaggaaacgcccttctttcacttttaaactaccttcgtagtaattttcaaagcgtaagatcaaaaaattcttctgctgggacacagtcacatggatcaaccgcttttccttgtctgcaatcttaagctcacactcaatggcgttatccagcgcatttccaaaaatactgcagatatccatgatatccataaaatcaagcagcgttccgtctgccacacacgtaaatgtaatgccatgctttgcacagtacaagcttttactcgtaagcactgtatctaacactttatttccggtcttgttctgtgcttcgtactgcctgatctcatcttccatatgatttaaaaattcatttcttttttccggatccgtctcgctccgcagcactgctatctggtgctttaaatcatgatatttataattgatcagatcaatgctctccctcgactgcttgtactgcacatactgattctgtaaaacattctgcactgcctccaactccctgcggatacgcagctcgccacactgaatcaggtgagcatataaaatggcaattccaccgagatcaacgatcgtgcggacatgaccgatttcaagcgcatatccatttgaaaatgctcccgtatcagaaataaaactcagattgctgactgcaaataccgctatcacaatcaacgccgccgaaaaatattccttgagactgatatttagttttccatcttttggcaaatgctgctgcaatagcttccataataaaaacgcaactgcaccataaaccgctgcaagcataagtacctgcattccggcacccggcaattgtcttgtccagatcgagcatacaatctgccattccatagatgccataaattctgccacaacaaatgcgatcataccaaaatatccggcatcccgaaaattcacatcacagcataaatgaataaaccctatcattagaaaaactgctatgatcatgcacggtatccagaaataaattaacacattacccgttgataccagaaaagccgactgcacgatcaacattcctactataattaatgcacttttccaccactcaaatctctttttcaacggaaaaataaaaatcaggcaggcaatccactctgcagctgccgtgtaaattcgcggaatatccggcataagattatcgatcatttcacaacctctccccaataattcgtcaatgcttccataaattctttcttgcgggagcggcttaaaagcaacggttcaccctttacaaccgcacatccatcctgaagtccctcaacatgctgtaaattaatgagatagcctttatttccacggcagaagttcaatccctgcagcttttcctcgacctctttcatcgtgccagccgattcatagtcaccaaggatcgtatgcagaaccagattgtgcccctgactttcgatataataaatatttgcaatattgatccggacagcgccgcccttgatgttcacagtgatgaccttctgctcacgtttcttcatacggctgatcgcacggtttaatctctgcgaaaatgcaaagtatgacaccggttttaacacataatccagtgcatccactgcatagccgcggatcgcatactgcgccatatttgtaatgaaaatgatgacaacctccgtgtctactttccggatttcctccgcggcagacataccatccatgaacttcatttccacatccatcaggataatgtcaaactgtgacttatacttatgtacgatctgatccccgtctgaatagacggtaatattgaatacttctccattctccttctgatactgcagcaaaaactcctgcagctgctttgcgtacatagcttcatcttcaacgattgcaatattgatcatctgtgctatcccttctatatcaaacacatttcatgcccactcatacatgcaataattttatcacacaaaaaaagaaaatacatctgctttttcgttgacgcaaaatattttccgtagtaaaattgtatcattatacttttttggaaagagagagataaaatgagtattttcaagaaaaaactgacagtgaacgaagcaatcaacaaggctcacacttctgagaacgccatgttgatcgactgtcgtaccaaagatgaatttaaccacggacatgttgccggtgcggtcaatatcccattggataaaatcacggaagaccgaatcttaagaagattcccggataaggaaacttctctctatatcatcggcagttataatttcagaccgggaaaagcggtcaaagcctttaagaaactgggctataaaaatgccatcttcggtggaaacatggaagagcattatggaatgttgaaaaaataagtttcttcctatcgcaaatgcatttacatggaaatccatccaaatgcatttgcgacagagcttaataaaatgattccagcaaaaatcggacacagatactgtatcataaacagaaagacttttcttcttttgaatgtgccgccaccgtatgtcacttcttcttcgattctctttaccccgacaacccttgaaacaaaaagacaggtagcaattgccgcaatcggcatcatgacagagttcgtcaggaaatcaaaaaaatccaaaaactgcatgccaatgatcttcacatttgccagaggtccgtatccgagcgaagacagacttcccagtgtgatcatgatcacgccacagagcaccgtagattttttccggctccacccaagttcatcttcaaacgtggataccgcactttccgtcagtgcgattgaactggtaagtgccgcaaaaagtacaagcaagaagaacattactcccgccaaagttccaaatcccatacttgcaaaaacttttgggattgtaataaacatcaatgccggtccagcctgtaaggtgtccggatctccgccagagaacgcaaacaccgccggaataatcattagtccagccataattgcaattgctgtatcaaaaatttcaacattctttgtagactcttcaatggaagtttcttttttcatataagaaccaaacgtaatgagaatacccatcgcaatcgacagcgaataaaacatctgccccatggctgccacaacggtcatccatgaaaagttactgatattcggcacaaggaaatatttcacaccagccaaagcccctggtcttgtcacagaataaattgcaatgatcacagacaacacaacaagtatcggcatcatgaatttggagacacgctcgattccattgcgcacacccgcataaataatcgccaatgtgatcacagaaaagatcacaaagcatatttccgtggaaaatccatctgagataaatgcagaaaaataaccatcttctgcaactgtctgcgcatgtcctctgacatactcaaccagatattttaaaacccatccaccgatcaccgaataatatggcacgatcaaaaccggaatgattgcattgatcccgcctcccagacaagacaaatgtgattttccaaaggaagcaaatgctcctaccggactttttttcgtcatgcgtcctaacgatgtctccgtcatgatcatcgtatagccaaaggtcaatgccagaatgatatagataagcaggaaaatacctccgccgtatttggctgccagatatggaaaccgccagatattccccaatcccacggatgctccggctgctgacagcacaaaaccgatttttcctgaaaaagaacttctttttgtcgtttgatttttcataattttctctcctgatttctattttgaaacatactcagaatatcatagggagtagggaattacaatattgtgataatctcttttatccaagcagagtggtataaatttacaatctttatccttaaacacattgaaaataatgcg

SEQ ID NO: 14313 - DNA, 34153 bp, Unknown
  gut microbiota DNA sequence
ttttcacttggattcattctgctatcttcaacatttccacataaaatcattctaactgtattcataataatcctcctccacatataacttccgattgttctatttcttccttttctgatttgaaatacttttttacttctttcaccagcaacacaattaaccatttaatttctggaacatttttctgcatcaattgcaagtacaaacatcaacgcatctaatgcattttccggatcctgtacatcaataacataagtgtcagtcatacgaagcaattctttacttatttttgctatctgataaccgcttcgatcaagaatactataatcccattccataatagttccttatgcgtctgatctggagtatgcatttttcatctgattgctcagctcatacaatactttattcaatgtatcctgcgtttctttttttaccatgtcagcgattttttcatttgcctcctgacgaagctgcatgcgtttttctgcgttgctttccttcgcaagaagttcatcatattggttgatatattcatgtccttttgacatgactctttcctgataacgttcaatatggaaaatggatttactataagaagcatctgccatggctgcgatcatcctgcttgcccagtaaaaattatctgttgaagcatctccggtcgtattggaaaaatactccggtactttctctacatctgtgtagaatggtgcggctgtattaaatacgtttgaagcaaatgccacccattcgattgcccggctgtcttcttctgcatccggtctcatctgaatgattcccaagaaatctgtccggtttacaccgatcgcacgatatgcacctttcatagatttctcaccataagaagcatatggatcgtatggtgtgccctgaaaatgagaagaaagcacatattttacatcttcgatcgtcacctttttctccggaaccatgcaccaagggatatcatcagaaagtggtgtaaaatccgcatccggtccatcccagttcattgtactcggattcaggcagcgtgccatataccatgctctcggtgtattgtatacatgatcggagtcatcatggctgccaaaaatatctcttggattgaatgttccatcctgtgaaaggtttaaatgatttttttcaacaaactccttcagatcggcggaacacatatattcgttctggtcttggaatgcatcctcaagatcaaactgatccattccaaactgatttggcatcatcacataaacatcatccggtacttttcgtgcgatccagtgatgtccgccgatggtctcaagccaccagatctcatctgcatcctgaaatgcaattccattcatttcataagtaccatactgttctaacaggctgccaagacgtttgacaccttcccttgcactgtgtatgtatggaagtacaatgtatacaatatcctcttccccgattcctcccggaatttcttcttttccgtcttttgcaggctgatatcttacaagcggatcagctccgagaactcttggattggatgtgatcgtttccgttgctgtcattccgacatgcgcttcattcactccgcaggctgcccagataccttcgccctcttctgcatttggcattgcagtatagcgcatcggattttccggaagctcgatttcgacatgtgaaatgaccgatttatagattttcggctgttcttccgggtgaatcactgcaaattttttggatgtgtaatgtccggaaccggaatcatcatttctcgcgattatagttgatccgtcataggaagctttttttcctactaaaattgttgtacatggcatatttatgttctcccttctttgactatctgattgtgataatcataactatctgaataaacgtgtagtaatttcaccatatttttattgaattaaaatcatcgcacctaccgcattgtagattatatgtagcactacagaaccccataagcagtttgttctcttatatactgcatcgcaaaagaaatgtaacataatcagacagattatataggtaaatgacagcacatgaattgttatcattcctgaaactacccatcttaccggataatgtattaacaggaataaaagtgaattgattatactgattaccaattgactgtttatcaaccctgacattcttgtctgtatataccctctaaataaaacctcttcctcaaatccggcaacaatatatatcacccagtttaaaaatagttgatttattgttaatgaaattgattttccctgaattatgtacaataatatttgtatagcaaggagcagaactcctcctgcaatgcctgatataatacttttctttagattttttgcatgaattcctatgctacttatattttctctgctgttatgaaaaaaatataaaaataatatagtgataagtaaaggtatccctatttgtgacaaatttaacacataaacatttaagtttgttgtatagagccagccttgaaaaaaggcacttccaagaatcagacaatatacaataatcgcctttcgtgcatctcttttttcatagattcttagattatgcgaataatcatcattcacccacttcatgaaacttcctccggattaatatatttcgcaaaaagaactatcctgctgcaatggaatttttttcgcatcgatccgctcgatccagatatatgtccggttctgtaaaaaaatgataagctggtcgatcaattcttcctgtccttccacttccatttccacactgccgtcatataaatttttcacccagccggtaagtccaagctggtttgctttctgcactgcataataacggaagcctactccctggacgcgcccgtaaaaaaagatatgtttgcgcactttttcctgtttcatagctgtctcctcatcctgttaccatatccggataattttttatttttaaaattttactcccttttcggaaaagtgttctcattacttaaaattctaagtaaaatgcatatttacacatgggtttattaaatctgaacttacctaacagttcttcaaattataaattgtctacttatcttttctaaaacattctacaatcataaggacgataccaacaattacaaaaataactgcaaatacaaataatgacattatgttcatttcttgcattgttgaaaataatcttccaggaggtgttgcccaaccgctaactaaattatttccggcaattacaattaaggccaaactccatatactacctattaatgatatgaaccctcccgctaatattcgtttcataaatttaaatcctctcatacttttatttggctttataaatttttatgtgtttaataataaaatagatgtctgctatttgcaatgtatatttataaactcatttcccatgggtacacaattccgaaaagggagaaattttaaaaggtaagccgcatctgattccatatcacatttccatgaacagattgggacacaccttcattttcaaaaccgaattttgcataataatggatcaaccggtctttgcaggttaaaacaagtccttttctcccttgtgctctggcatcttcaatggctctatttaaaagttctccggcataaccatgtctgcggtagtccggcagcgtgttgacaccaaaaatcatctgccatgctccattttcatcatgcatttctgctttttcatacatttcatctgtgagatccagctcgtccgtcaccataccatccacaaatgagattaatttttccccttcaaagataagccagaaatggtcagcataatgcgcaagtctctgctcaaattcttcttttgttgctgcctctgcttctggaaaacacgctttttccactgctgcaatctggtcaacatctgctaatgttgcggttctgatctgcatcttttctttgtctcctttgtttctctcatttttccctgaaaatagcaaaatttcttttcggtaatctggaatctgatagtattctgccgcctccttaaaatacttttcgccaatatgcggccattttgtctgaacattgtcctctaatgcaagtttttctgccagctcaaccattttggctgaacagtcgattccggtaaggatggtcagaatattgctgttcacaaaccacggtgctatagaaagcagaccgccggtgatcatatcctgtgcaactttctgattgtcataaggtactttcagaaattgaggtttccatattgttgttccattttccacaccggactctaacaacatgcactgtgcatatccggcatcatcaatggatattccaacactgccagcattaaagtaatgtttgtttttgtatgtcatctctcccggataatgggtatgggcgcagatcatgtaatcggtgtcaatcttttctaaccattgttttactggatcttcattcaactgcaggagttcccggctgttcgccggtgatccatgacagcaggtaatggatggataaccttctttttcataaacgaatgtgattggaagattccgaaagaaatcaaaatctttatccacaagctgcccgtaagtgtagagtagatttccacttgcagagttacttatccacatctgctctgttgaattcttttctcttgcctctttctgtgcgagcatatactcctcacggttgcctcttaacaggtaacaggtatggttttccataaattcatacagataatccatagtttctcttgtgtaaggtgtatcggaaatataatctccgagaaagaagtactcgtcacagttctgtttttccatatactctgtgcacgctttaaatgcatagatgttgctgtgtatgtctgatataataccgattttcatgaagtctccctgctgctgaaatcattccttttatctattatatttcgaaatccatgcaggaacggattgctgtgtatggtctgacttttgtgtcagcaactgctacatgttttggatttgtgctgtaattgtgcaatgcttcttcatctacgaaagtagaatctaacatgacatccacgtttgaactggaaagacagtcgattctgactttaatatctgtaagtcccggaatctgtccggcaagaccttctaacccttctttgattccggctttgatctgctgttttttctcctctgaatattcttctttcagtttccataaaattatatgctttaccattttttcttttctccattttttacactcattataatccatcctagttttctctaaaagttattttatagaaattttatcataatatttttatcaaaaaaatagaacagcgccccggttggcaactgctctaatttttcacttatttttcaataatttttacggctgttccgtaggcgatcacttctgccgcacctgccataacctgagaggaaccgtacataactccgattaccgcgtctgctcctaactctttcgcctcatctaccattctttttactgcgatctgtctggcttcgtttaacatctctgtatatccgacaatctcaccaccgacaagtgttttcattcctgccataaaatcacgtccgatgttttttgtctgaacaactgttccttttaccattcccagtgcctcaatttcttttcccggcacatactcaatacttagcagcttcatcttcttctcctccttcgatttcctttagtctgcttctcaatgctacgatgatacagatgattacgacgactgggattccgataaataatattagaattccaattggtaatgcatcctggctgttgccccacagaaaaagaccaatcataaacaacatgagaataatcattaccactccgccgatcgtggctcccatttttttcttcatgtgaatatcgattttgcttacgtccacaaaatctactccttccttttccattttttccatctcgtccagccactcatctgtgtttatagtatcaaccgtatcttttttctgaaggattacattggagagcttctgcatattgttaagattttcacgttctttttccagatgcctcatctgattttcgagacattcttccagagaaatgcttttgcttaatacagatttgatttcttccaccggaacaccaagtttacgcagaagtttgatttttttcagagttttaatgttttcctcatgatattcacgataaccattctctgcccgctccggtgtaaggagtccctgttcttcataaaaccggatatttttgctggtaattccgaccagttcttccacctgtttgattttcatgccgatcctccgtttttctttgggtcttttttcacaacattttgtggctgaatcgcttgatgtagcttttttatacagcttccataaggtggaaggtcaagagaaaattaaaaaaaattatttttcatacataacctctactgcaccgcagaattcctttgctttttccgttttatgaaaaccctttgcctcataaaattttctggcacgaatattcttttcaaacacccacaaaagtgtatgtacataacctgctttttccatatctcttaaaatctgttccatcattttactgccgtagccttttctccagttatcctgcagactgtggatacagattaattctgcatacccggacatgtccggatcgcgggcagcatcccaccatgcgatacagtgtggctttccctccacttcgagaatatagccgttcccttttttcgcatccagaagtttctgatacattgccgtagcacgttccaaattggtgcactgctttaaatcttccggttctaatatatgttgaaacgcagctttccagctctcagtctgtatataaaccaaaatctgcgcatcacctgccgtggctctgcggatgttataattttcattcatcttttaatcctctacatatttcagcacacccggatcttttccatccacatatccggtgacttgaaacgcaatattttcctgtaatttttttattcttttgaagtcattcacccaaatgtgctctctgtctttgtaataaacagatacatccagtgatttcagtgcataaaatgggctggcgttgacgctttctctggtcgtgtattcttctgtctttccagtttgtgggtttacataattcacaatcaaataataggtaaaattataatcagcactgttataattataaaacctatgtgtttttaaaccgattattttccccggaagctttatggaattctttttaaatttttttatttttattctttgaatattaaaaaataaaataactgctatataaatacaaacgacaattcccacgatcagaaagttttcttttcttccggctgaagtctgcattgaatccgaagtaaaagccaaaatgaaaataagcatcagaaagagaaccgctactattattttccatgtgcttatccttgattttttctttgttgtgtaatcaaattttaccttcaccatgtccgttccacgaatttttacccagacataccagccaccaaaaataagaaatgtaaatataataaaaatcattttttataattcaccttattttcctaaagtcacgttttactccaacgtgcaatactctttgatcgctgtctcatacagattgtttccctcactgtcaatgacaacgatcactgggaaatctttcacttcaagcttacggattgcctcagctccaagatcttcgtaacatacgatttctgattttgtgatacatttggataaaagtgctcctgctccgccgactgccgcaaagtaaactgcatgatttcggacgatcgcatccattacttctttcgaacgttttccttttccgatcattgctttttctccgagatctaaaagagttggcgcgtatttatccattcttgttgcagttgtaggtcccgctgaaccgatcggacgtccctctcttgccggggatggtcccatgtaatagattgtggaatccttgatgtcaatcggaagttcttctccactctccaatgcttcgatcattcttttgtgtgcggcatctcttgccacataaatggttcctgttatataaacataatcacctgattttaaattttttgttatatccctggtgatcggtgttgtaatatgtttgtccatattctgcactcccatctttaaatttttattttattcgtatcaatcattgaattcacagttgcgatccacatatttctgtactgatcaaatatgtttcctctgcttttgactctgaatatatagactacatttgtagtgaaatatttttatacttctcttatcacatgccggttcacatgacagcagatattgactgctaccggaagccctgcaatatgtgtcgcataagtattcacattcactgcaagtgctgttgtcgttccgccaagtcctcccggtccaatcccaagctgattgatctttgtaagcatttcttcttccagttcccgcacatatgggatatccgaatgttcatctaccggtctggtcagtgcttttttcgctaaaatcgcacatttttcaaaagtaccgccaacaccaacgcctactaccatcggtgggcaggcatttggaccggcatcttttactgctgtcagaattgcgttttttacaccctcaattccatccgctggttttaacatgaacacacggctcatgttttcacttccgaatccttttggagccagtgtaagtttcactttatcacccggaacaatgctgtaatggatcaccgccggggtattatctttcgtattttcacgtatgattggatcaccaacgactgattttcttaaatacccttcagtatatccctgacggacaccttcgtttactgcatcttcaattgccattccctcaaaatgaacatcctgtccgacttcaagaaaaataactgccattccggtatcctgacagattggaatcatctcttcatctgcaatttttaagttctcctgaagctgatttaaaattttttttccaagttctgacttttctgaagcagtggcatctttcagggctttgtccatatctttggaaagataatggtttgcctcgatacacatttcttttatattttttacgatatcatctgtattaactgttctgatcatttttatttctcctaatattaaaatatttcttatacttctgcagagattcattctgttcacgggaggtcatatctgggaacgctttcatcaaacgcttgaaaccaaaattcttctctgcaaataattctttgtactttttctcgagctcttctttttctttctgttttgcaagtcgggctgcttctctgttttctttgtatgcagcaattttctcttttgctgcttcggtcgattcagcaaatctctctcttgcattttctgcagactctgcaattctttcttttctttcctccgcagagagtactattttttctctggtggatgattttgtctccgccagtttcatccttgttgactcagcagattcttcgatccttgctttcgcatttgctggaatctcttttatattttcttttttgtctgaaatttttgtaagaagttcttcatgtgtttcctggaactcctccgatctttctactgcggttgtcacattctcataaatattttcgccaatctcatcagatagtttatgtattttcgcagccatttcatccattactttcagccgcttgttaaacttcaaaattgtagtaacagtaacaccacagtcaacagcaaaaaccgccatgacaatgctgagcagcacaacccccagaatgtgagggatcatggtgatacccttgtaaatgatcggatgaatcacatccataatgaatgtacatgcaagtccccagtagatggaaaatttcaaacacacatatccatgcagattgaatggcttgttgctataatcccaccacttgttgtgaaacactttttccaaaataaatccggtaatgtattccaaaatggaagtcagtaacaaagaacccgcaaataatatcagcagattatcctttaacggagtcaaaacagctacgacgatcaccactccacatccgtaaattggacaataaggtccatttaaaaatccccggtttacaaaaattccccggtccaatgctgcataggatacctctgtacaccatccgataaatgcataaataataaaaatccatactaactcataaaagttttgcggcattttgcatccccctgttgttctgctttctaattggagttttactacaattttaaaactcttgtattctatatttacgcaaaagtataaacgaaagttttttctatgacaatgaattttttccacggaagttcgatttctgcaacacgttatccacatttacactgtgattttcttgataatatgtgttattttttatttttgtgttgatatcatttatttttcaaataagcaaaatgaaacaacctttttttaaggcttcttatcatgaaatataattcgtttttatatagacaaatcggctgctacataaaaatgtggcagcctactgtcctgaccatagtgaattctttgtatcactgcggtcaaaatattcttttattcttcttccgaatcagactcagcacggcttaataattcctgcattaattcatcatccgtttctgtcatctgacctgccgctttttttgcagcctctgctgcagccgcagcactttgtgcttcctcttcctctgtgacaagttcagatttatctgtattttccatgagggatttgtcctcacgtacttttgcaatgcttgcaaccgtgacatcatccgcaagattcatcagttttacaccggaagtaactcttccgagcaatgccgtatcactgactttgattcggataataattccttccgttgtgatcagcatcatctcatcatcctgattgactgctttcacaccgacgatatttccggttttctctgtgatcttatagcatttcacacctttaccaccacggttctgggctgtaaattcagatgcaagtgtgcattttccaagacctttttcagatacgatcatcagtgattcaccctgggattccatctgcattccgacaactttatctccatctgtcaaattcataccaatcacacccatagaggttcttccggtgcttctgacatccctttcattgaaacggatacactgtccgtattttgtcacaaggaaaatatcctgttcgttgtctgttttctttacttctatcagctcatcatcttcacgcagtgtgatggctgcaagtcctgtctttctgacatttgcatagtctgtgattggtgtttttttcacgataccattcttggtagccatgaacagataatgaccttcggtgtattccttgattggaatgaccgcagtgattttttctcccggctgaagctgcaacaggttaatgatcgcagttcctctcgcagttctgctcgcttccggaatctcataagccttcattctgtatacgcgaccagtgtttgtaaagaacatcatgtaatggtgggacgttgtcatcaaaagttcctcgatataatcttcatcgattgtctccattcccttgatacctttaccaccgcggttctgcgcgcggaagttatcaaggctcattctcttgatatatccaagttttgtcattgcgatcacagtgtttgttaccggaatgagatcctccatggaaatatcatactcgtcaaatccgatggaagttcttcgctcatcaccatatttttctgcgatcaaaaggatttcctcacggataacaccaagaagttttttctcatctgccagaattgcttttaactctgcaatacgatccatcaactctgcatactcagcttcgattttctcgcgttccagacctgtcagtgcacgcagacgcatatccacgattgcctgagcctgaacatctgtcagggaaaatctctcgatcaagcggttttttgcttccggtgtatttgcactgcttcgtataatgttgatgacttcatcaatgttatcaagcgcaacgagtaagccctccagaatgtgagcgcgttcttctgctttgtttaagtcatattttgttcttctggtcacaacatctttctggtgatccagataatagcctaacatttcctgaagatttaatactttcggctgattgtccacaagggctaacatgatgacaccaaacgtatcctgcatctgcgtatgtttgtaaagcagatttaaaaccacattcggatttacatcacggcgcagctcaatacagatacgcataccctggcggtcagactcgtcacgaagatccgtgattccgtcaatttttttatctcttacaagctctgcgattttctcgatcagtcttgctttgttgaccatgtatggaagttcggtcacaacgatacggtttttaccattttgcattggttcgatattggtgatcgcgcgaactctgatttttccacgtccggtgcggtaagcttcgttaattccggttgttccaagaatcatcgctccggttggaaaatccggaccttttacaatactcaaaatttcttcgatatctgttccacgatcctctagcacttcgttgtcgataatttttacgacagcatgaatcacctcacgcagattgtgaggcggaatgtttgtggccataccgacagcaataccggttgttccgtttaccagaagattcggatagcgggaagggagcaccgtcggctctttctcggtctcatcaaagtttggtacaaagtcaacggtatctttattgatgtctgcgagcatttccatggaaattttactgagtcttgcctctgtatatcgcatcgcagcagcaccgtcaccgtcgacagaaccaaagtttccatgaccatcaacaagcggatatcttgtagaccagtcctgtgccatgttgaccaatgctccatagatggaactgtctccatgtggatggtatttacccatggtatcaccgacaatacgcgcacattttctgtgtggcttgtccggtccattatttaattcgatcatggagtagagtacacgacgctgtaccggtttcaaaccatctcttacatccggcaatgcacgctgggcgataacgctcatcgcataatcgatgtaggatgtctccattgtttttttcagatcgacatcatggatttgatcaaaaattttgtcatccattctatttacctcattcctgcagattctttttggttcaaaatctgcatttctctaatcaaactacatttgcaattataaattaactttctatcacacttttaaactacatttgcagtaatatataatttccagcacacttaatcttagatatcaagattctgcacatacttcgcattttcttcaataaactcacgtctcggttctactttatctcccatgagagttgtaaatgtaatatcaatctcagaagtactctcatcatcgatcatgacacgttttaaaattcgtttttccggatccatggtcgtctcccagagctgttccgcatccatctcaccaagtcctttgtaacgctggattttattatttccatcacgtccgatttccgttaagattgcatttaactcatcgtcactgtaggcataccatacatttttatttttctcgatcttgtatagtggcggctgtgccagatatacatggccttctttgatcagatccggcatgaaccgataaaggaatgtcagcattaacgtactgatatgggcaccatcgacatcggcatccgtcataatgataatcttgttgtaacgaagtttgctgatatcaaagtcttcatgaatacctgtaccaaacgcagtgatcatcgctttgatttcagcatttccataaatcttatccagtcttgccttctcgacattcaaaatctttccacgaagtgggaggattgcctgggttgcacggcttcttgcagtcttagcggaaccgccggcggaatctccctcgacgataaaaatctcacagttctttggatctttgtcggaacagtcagccagttttccaggaagtgacattccctccaaagctgtttttcttcttgtaagatcacgcgcttttcttgcagcctctcttgcgcgctgcgctaacagcgatttttcacagattgtctttgcaaccgttggattctgctctaagaaataagtgagctgctcacttacgatagaatccaccgcaccacgagcctcgctgtttcctaacttctgcttggtctgtccctcaaactgaggctcctcgatcttaacactgatgattgctgttaatccttcacggatatcatcacctgtcaatgcaggttcgttatcttttaataacttattggctcttgcataagcgttgaatgttttggtcagcgcattacggaatccggcaagatgtgtaccaccttccggtgtgataatattattaacaaagcttaaggtcagctcattgtaagaatcattgtgctgcatggcaacttccacataaacaccattgccgctgccttcgcaataaataacttccgggtataaagcttctttgctcttgtttaagtaagtgacaaattccttgatacctccggcataatggaaatcatgcgttcttgccggatcttctcttaaatctgtcagaacaattctcaaacctttggtcaaaaatgcagtctcacgcagacgctgttttaatgtgccataatcaaaaaccgtctcctcaaaaatagaaccgtccggccagaaagttaccttcgtgccatgtttgtcctcaccacattctccgatcacttttaccggttcatccggtttaccaatcttatagctctggaaatagacttttccctcgcggtaaacttctacttttaactttgtggaaagtgcatttacaacagacgcacctactccatgaagacctccggatactttgtatcctccaccgccgaattttccaccggcatgaagtacagtatatacgacttccaatgcagactttccagctttgtgattgatatcgaccgggataccacgtccatcatcttctacagtgatcgaattgtcttcatttatggtcacttcaatatttttgcagtatccggcaagtgcctcgtcaactgagttgtcaacaatctcatataccagatgatgcaagcctctggctgatgtactaccaatatacataccaggtcttttacgaacagcctcaagtccttccaaaatctggatctggtctccaccatattcgttttctgtacccatttattcctccattctgcacataattctcatgaaaatcatacttcttatgtacacttgaaaattaatttcaacaattgttcatttgtactgaactacatttgcagtgataatttaattaaactacaagtgcagtgatattataattctttcttctcttccacagtcccctgcacaactttaaaaatcttattgatctgaaatctgttttttacaaactcatccaatcctgtacaggtgatcagcgtctgcgtatcgtgaatactgtttaacagataattctgccggttactgtcaagctccgacaacacatcatccagcaataataccggcatatcatggatcgacctttttaccagttcaatctcagacagctttaacgacaatgcggaagttctctgctgtccctgcgaaccatacttccggatgtctaccccctttatggaaaaaagcaggtcatcccgatgtggtcctacagatgtcatacactgccgcatatccctctcttttacccgggataattcatcttcaaaaaagatatcatcaatgcttggctcgtactgcaagatcaaatcctcttttccgccggaaatccggtaatgaatgtcatgcacgatttcattcagctcttccacaaattgttttctgcgcctgatgattttctttccagtttctaccagctgcatatcccataccggaagtgtatcctttaaatccggtctgtaaaccatatcttttaataatttgttgcgctgattcaaaattttattgtaagttgtaaggtctgacaaataaattttatccaattggcacaattcggaatccaaaaatctccggcgctccgccggaccatttttgataatattcagatcttccggcgaaaaaaacaccatattgagaatcccgaaaagttcactcgcttttttgattggaactttattgattgcgattcccttggaacgattgtgtttcaaatgcatatcaatctgatattctttttcttttctaactacaattgtcctgatatgggcttcctgctccccaaaacgaatcatttctttgtccttactacatttgtgggacttagttgttccacttaggtaagcagcttctaaaatattcgtttttccctgcgcattatccccgtaaaaaatatttgtgccttcatcaaatgaaatatttaaatcttcataattccgaaaattctgcaattcaattgattttatgatcattttacaatctgaattgtttcgccattaaaagaaacaacatctccgttgtataattttttgccacgctgaagttcggtctcaccatttaattttacctgaccgtcctggataaaaaacttcgcgtcaaccccggattccaccagtcccgcttttttcaaagcctgtcccagtttgataaattcatccgtctctctgatatttactgtgatcatctttttgcctttcttagtttgtggctgcgttaaagtttaccggaagaatcagataaataaactttccatcatcatctttgataaaacatggagcctttggatttaccatgtaaagggaaacttcttcctcatcaatgacacggagtgcatcaataaagaactttggattaaatccaatgagaatatcttttccctcttttgtgatatcaatatcttcattcatggaaccaatgaaggaattaatctttaattccattgtcccgtctgtgatattcataataattggcttcttgtcaccctcttttacaagaagtgttgcacggtcaatacagtctaataactcgcgcttattgatctttacttttgtatcataatcagaggaaagcatctgctcgatcttaaaatactctccctcgatcaatcttgaaactacagttgtatcatcaaattcaaatacaatatgattctctgaaaggaaaatattcacttcctcatcagcgcttccaggtaaaatcttacttacttcctgaagtgtctttcccggaacaactactttcttatgatcataattattctttaattcaatattgcggatagaaattctgtgaccatccaaggaaacaacttttaactggttttcttcaatctcgaaaagttcaccagtcatcagcttattattatcattgtcagcaatagagaaaattgtctgacggattacttcttttaaagtaaactgcgaaattgagatacattcatctctttcaatataaggaatataagaaaaatcatctccagattttccaacaatgttaaactttgctttttcacaggtgatcgtagtcttaaaattggaatctgtctcgatcacaacatcactgtccggtaattttcgaacaatctcagaaaagatcttagcatccagagcaatgatacctctctctgcaatctcaccttcaatcttagtctcaattccaagttccatatcatttgcggttaatttaatctcattagcagaagcatcaattaaaatacattcaaggattgccattgtcgttctggttggaacagctttcgaaacaatgttaactccatgaagcagatttgctttagaacagattaatttcataatgtgaataactccttcctgcttggcgaaagccaatataaatataattattaaaagatattaaaagtcgtcgtattagtgtgtgtgaataagtgaataacccttaaaccccagaaaaaacaagggcttgtccgaaaaatccgactgtataactatgtgaaaaagctgaggattaaccttggataaattgtgaattaaatttttgagcctcttcagaaaaaatttgaaattccttctgaaaaataggttatccatagctttaaacataaattaaacatcatttacacaggttatccacgaaattttgttaataactcgaaaaaaagttgataactttagtttggattaattttcttcttgatagtttctattaaattacgtgtctgctcgttagaatcgtactcatccgcaatctttttgattccatggataatggtggagtggtcgcgtcctccaagtaaagaaccaatggaatctaatgggatatccgtcatggtcttgcacagatacatggcgatctggcgtggccttgcaatctcgttgctccggttcttcgagatcatctggtctaaggaaatctggaaatgttccgaaacaacttcgatgataagctgcggagtgatttctcttggcttgtccggagtgataatattctgaagttccttcatggcgatttccatggtgatgtctgttttttccagattcgagtaagcaaggagtttgtttaaagctccctctaattcacggatgttggatttaatgttattggcaatgtaatttaaaatatcatcgcttaaagacatatcatccgattcgactttccggcggaggattgccattcgcgtttcataatcaggagcgccgatgtctgccattaagccccattcgaaacgggagcggattcgttcttccaaagtttccatatcttttggcggtttatcggaagttaaaataatctgtttgccggcagagtggagggcgttgaacgtatggaaaaattcttcctgtgtactttcctttcctataataaactgaacatcatcgatcataagaacatcaatcgttctgtacttttcacggaacttgttcatcgcggaggcgttaccactacggatcgattcgataacttcgttggtaaattcctcggaagtaacgtataaaaccttggcatccggatttctctctaaaatgaaatgtccgatggaatgcatcaggtgggttttaccaagtccaggtcctccataaatataaagagggttgtaggcttcccccggagattccgctactgccagagaagcagactgcgcaaaacggttattgcttccgacaacgaaagtatcaaaggtataatttggattcaggttggagcgtttggaaacttctgattctggggtccgctttgctttattgccggaggtcttaatgctctttgtctgctccggtaaaataaactgaatttcatattctgttcctataatttctgcaattgcaacttttaaaggaagatagtatttttttgaaatataacttaaagtcatctgttcggacggaacgagaatatagagggtgttcccctcaacgccaaaaacttccagaggtttgatccaggtatcaaaagaaatatcactgacatcatgttctgtttttactgtttgtaaaatctcatcccatttttccaaaatcttatccattttataactccgttttctgatagcactaaaatacagcagtcgttctcaactgcttcaaaaaaaatctaaaaaattctatataatgctatcctacactatttttgcggatttatcaacgtttaattgtggaaggtctggggatagggcgttgataaaaaaagtggctatatgggcattttaacgcttaatgtgaatatgctagaagttattgttaataatggaaaaatagttatagaccagtaaaaataaggcttgtacacatttatgcacaagttatgatgacattatcaagaaattgtccacaagttatccacaaattgaggataacttatgtaaacggcgtaaatactggttttttcgtggaaaaatttttcgattgtgatgtgtataaccatataccacatatagataaaaatgcatttcttccttatatatatagtggtaaaaaacaaaaattgataaaatgtggaaaacaaaatattggcaaaagccttattttatgagattttgcttgactttgtccgattattttgatataaataaaaatgatgttttgtcgctattgaagtagacttatcataacattgagtaaaataaatgtttgaattgtagaggaggtgtatgtgacatgaagatgacatttcaacctaagaagagacagagagcgaaagttcacggattcagaagcagaatgagtactgcaggcggaagaaaagtattggctgcaagaagattaaaaggtagaaaaaaattatcagcataggccacatatttgtggtcttttcttcttttatgatcaatttttggtaaaggaatattagatgaaatattcagaatcattaaagaaaaacagagattttcagaacgtatataaaaaaggaaagtcttatgcaaatcgttatctggtgatgtacgttctggaaaatgatacagacagaaaccggttaggcatatcggtaagtaaaaaagtaggaaatagtgttataagacatcatgtaacccgattgatcagagaaagttaccggctacaggaagacatgtttaatagtggtttagacattgtagtcatcgcaagaaatacagcaaaagatatttcatatcatgaagtggaaagtgctttgttacatcttggaggtcttcataaaattttgaagtaaagattttagaaaagaagatggaatcattttgaaaaaaacattgattgctttgattaaattttatagaaagtatatttctccgatgaaaacaacaaaatgtccatactacccaacctgttccacctatgggttagaggctgtcgaaaagtatggagctgtcaaaggtggggcgttagcgctttggagaattataagatgtaatcctttttcaaaaggcggatatgatcccgttccataattggaggtattttcagtgtcagagatgttattaacagcatacaatggtgccattcttggaccaattgcaaaattacttggctggataatgaatggcatgtatattttaatggaaaaagttggaattaccaacgttggactttctattattttatttaccattgttatttatgctttaatgttcccattgacttacaaacagcagaagttttcgaagttatcccagaagatgaacccggagcttcaggcggtccagaaaaagtataaggataaaaaagatacagtatccatgcagaatatgcaggcagagacacagcaaatctacgagaagtatggtgtttcaccgacaggcagctgtgtgcagatgttaatccagatgcctttactgttagctttgtaccgtgtgtttatgaatgttcctgcctatatcagcagtgtgaaggatgtttatcttgatctggttgataagatcatggcaacaagcggctatcaggatattatgacaaacctgatgagcacattaaaattgaacacagtacaggttgattttacggcaacagatacaacaaccttacagaattatgtagtagatgttttatcaaaaatgagttctaccggatgggattccttaagagagtcattcccggcgctcacagattctattgattctacatatggtgtagtttctcatgtaaacaactttataggattaaatatttcggataccccatttcagatcatcaaagctgcatttgcaggtggaagtattctgatggcagttcttgcattgctgatccctgtgatttcttatttgacacaggttttaaatatcaagttaatgccaacggctgcaacagcaggcggagataatgaccagatggctcagcagatgaagatgatgaaccgcaccatgccattattctcactggtaatgtgttttactgttccggtcggtctcggtatctactggatcgcaagtgcggttgtaagaagtatccagcagttcttcttaaataaacattttgataagattgatctggatgatattattgcaaagaatcaggaaaaagcaaagaaaaaacgtgagaaaatgggaatctccgaaaaccagatttccaatgctgcacgtatgaacacaagacaggttacagcaagttccaagagttccgttaagacaacggcagagaaagaacttgagcttgagaaggcaaatgcattgaaagcgaatgcaaaacctgaaagtatggctgcaaaagcaaacctggtccgtgaatttaacgagagaaataataagaaaaactaacagattatttttcaaaaacgtgttggtaagataacgtatatgtggaggttattgttatggagtatattgaagtatcagcaagaacagtcgatgatgctatcacagaagcccttgtaaaacttggagctaccagtgatcagattgaatatgaagtaatcgaaaaaggaagcacaggatttttaggaatcgcaagaaaagatgctgtgatcaaagtacgtaagaaatattctgtagaaggcgatatcacagaatttttacagaaaatctttgctgccatggatctgaaagttgagatcattattgaaaaagcagaagatggtaatacttacaacgtagaactgaagggagatgacatgggtatcctcattggtaaaagaggacagactctcgattccctgcagtatcttgcaaaccttgcagtgaataaaaattctgaggaatacattaaagttaagattgatacagaagattaccgcaagagaagaaaagagacattggagaatcttgcaaagaacattgcttataaagttaagagaacaaaacgtcctgtttctttagagccaatgaatcctttcgagagaagagttattcattctgcattacagaatgataaatttgtaacaacacacagtgaaggtgaagagccatatagacatgttgttgttactttaaaaagagatagagaaagataaattcaagtatagaatttaaaagaccagaagctgcacgttacaaagctttatgaaaatgccggaaatgatatggcaggttcttatgaagttttgcggcgtgcagtttcgtgcattaaagtatttgaaaaaagcagccagactttttcagagttgttttagaaaaaaagaggaagaaatgatatgagaacggatacaattgctgcaattgcaaccgcaatgtcaagttcaggaattggaattgtaagaatcagcggagatgaggcagtagctataacagaccagatttttgaaatgaaaaatcagaaaaaattagcagacatgccgacacataccattcattatggacacattcatgatgatgatgaagtgattgatgaagttatggttctgctgatgcgtggaccaaaaagttatacaagggaagatactgtcgagatagactgtcatggcggcgtgtatgtcatgaaacggattttagaaactgtgatcaaatatggagcacgtcctgctgagccgggtgagtttacaaagcgcgcatttttaaatggcagaattgatctgtcacaggcagaatcagtcattgatgttattaattccaaaaatgagtttgcattaaaaagctctttaagccagctatcgggttctgtttctgaaaagattaaagaaatccgcggaactgtgttgcatgagattgcatttattgagagtgcattagatgatccggaacatatcagtctggaaggatatccggagcagctttctgttacagtatctgaagtgatcaagaaaattgaaaaattacttgcaaacagtgataatggaaaaatgttaaaggaaggtatttctacggttattgttggaaaaccaaatgccggaaaatcttcacttttaaattctctggttggagaagagaaggcgatcgttacagatattgcgggaacaacacgggatgttctggaagagcagattaatttaaacggtattatattgaacattatagatacagccggaatccgcgatacagaagatgtcgtggaaaaaatcggtgtggaacgtgccaagaaatatttgaatgatgcggaccttgctatttatgtggttgatacatccactgcgttagatgagaatgattatgagatcatggaactgttaaaagacagacatgctatcattttgttaaataaatcagatctgactccggttacaactgtgagtgatatcaaaaaatatctggataaaaaaatgatcgcgatttctgcaaaagagcagacgggaattgatgatcttgcagatacgatcaaagaaatgtttttctccggagaagtcacattcaatgatgaaatttatattacaaatgtaagacataaaacatctttacaggaagctttaagaagtttacatttagtattgcagagtattgcagatgatatgccggaagatttttattcgatcgatctgatgaatgcttatgaagaacttggaaacattatcggggaatccgtggaggatgatctggtaaatgaaatcttcagcaaattctgtatgggtaaataaattactatatgaaaattgtgaagaattaaaaagttttgataattatctatattattaatattaatgaggatagaaaaatggaagaaaagaagattccgtatgtagaagaagaatatgatgtggttgtagtcggagccggacatgccggatgtgaggctgcattggcgtgtgcgaggctagggctggaaacgattatttttacagtgagtgtcgacagtattgcaatgatgccatgcaatccgaatattggtggaagttccaaaggtcatctcgtgagagagattgatgcacttggcggagaaatgggaaaaaatatcgacaaaactttcattcagtctaagatgttaaataaatccaaaggtccggctgttcattccctgcgtgcgcaggctgacaaaatgaattacagcatggagatgcggaaaacacttcagaacacggatcatcttactattcgtcaggcagaagtttctgagattcttaccgataagatcacgctggaaaatggaaaagaaatccagaagatgacaggtgtgaaaactttttccggtgcggtttacaaatgtaaagcggttgcattatgtaccggaacttatcttcgtgcaagatgtcttaccggtgagatgattacatataccggtccaaatggtctccaggcagcaaatcatctgactgattctctgaaagcgcacggaattgagatgttccgttttaaaacaggaacacctgcaagaattgataagcgttcggttgatttttctaaaatgcaggagcaaaaaggagatgagcgtgttgttccattttcttttacgaccaatccggaagatgttcagattgatcaggtttcctgctggctgacttatacaaatgagaaaacacatgagatcatccggaataacttagaccgttctccgatttatgcaggaattattgaaggtacaggaccaagatactgtccttccattgaagataaggttgtaaaatttgcggataaagacagacatcagatttttattgagccggaaggactgaatacgaatgagatgtatgttggcggaatgtcatcctctttaccggaagatgtgcagcacgaaatgtatcggactttaccgggattagaacatgtaaaaattgtccgcaatgcttatgcgattgaatacgactgcatcaatccgaatcagttgtatgcaactttggaatttaaaaatatcaaaggtctgttttccggcggacagtttaacggaagcagcggctatgaggaagctgcctgtcagggattagttgcaggtattaatgctgcgatgagtattcttggaaaagagccgttggtgctggatcgttccgaagcttatatcggagttttgattgatgatcttgtaacaaaagaaaatcatgagccttatcgaatgatgacttctcgcgcggagtatcgtttactgcttcggcaggataatgcggatcttcgtctttcaaaaaaaggatatgagattggattgatttccaaagagcgttatgactgggtttgcaaaaaagaagttctgatcaaagaggaaattgaacgtgttgcaggagtgaaagttggagctaataaagaggttcaggctcttttggaaagttacggaagtattccacttaatacaggaacaactttaacagaattgatccgtcgtcctgaacttgattatgaaaaattatcgccaattgataaagacagacctgatcttccttatgatgttgtagaacaggttaacataaatataaagtatgacggatatatcgtgcgtcagatcaagcaggtagaacattataagaagttggaaaataaaaaaatagcagaagattttgattatgatgaagtgccgagtcttcgtatcgaagcaagacagaagctgaaactttataaaccgttgtcaattggtcaggcttcccgaatctccggagtttcgccggcggatatttctgtgctgctggtttatatggaacagatgagatatcaggggaaggatttataaggaaaataataatggcatataatttagaaaaatttttaaaaggtttggaagaacttcatatagaactcagcgaaaatcagattcagcaattcatacgatattatgaaatgtttgtggaaaaaaataaggtcatgaatctgactgcaattacagaatttgacgaagtgattgaaaaacattttttagacagcctttcactgatcaaagtatatgatcttacagaagaagtttgtgttatggatatgggaaccggagcaggttttccgggtattccactcaaaattgcttttccaaatctgaaagtcacattggctgattcactgaataaaagaatcctttttttacaggaagtgattgacgaacttggtttaagtgatatcaaggcgattcatgcgagagcagaagaacttggaaaaaataaagagtatcgtgaaaaatttgacctggtagtttccagagctgtcgcgaatctttcttctctcgaagaatattgtgttccttttgtaaaattaggtggaaactttatttcttacaaatccggtgagattgaggaagaagtggcaaatgcaaaaaatgcaacatttttgcttggcggaaaaatgaaagaagtctataaatttgatctgtatgagcagaaaagatcgtttgtcgtgatcgacaaggtgaagggaacaccgaaaacttatccgagaaaagccggaacaccgacaaagacaccgttgtaaaatggatgttcactgatggatatcatcatttgatgataaatcactgcatgaagaaactcctgtctttttcatgatgcaataacatgttgaaatgtaataaatgttttcacagtttatcatgcatcatttggaaggcaggagtttttgtaatctaattcttaaatgatcttattttaaaaacatgtcaattgtttccacaactttatcggcaacttccagctgaggatattttttacagttggatagatatacgatttcatttctggagtttgtctttttataagaatcagcaattgcgatagcatctttcatgtttcggctttcaatcacataaattggtgtttctaattttttcagagcatgttcgatactgttctttgtgtaatttgcctccatgcttgccattaaatatttaccatgactgaaattcatgtgggctgcttcataatatgcgtcaatcaatttggaagaaaccagctgtggtcttgcataatactcctcacggaaattctttgtgatgcaggagttgcttacccggatgttgtaaaggaaggttccgaggattggaagttccattaatgtttttttcacggatgcatatttatcggttgtaatatgaagctctttcaaagaggtcggattgatcgcaataatagaatttgcaagatctttattcatattgcatgctaatgtaacaaatgaaatagattcatttgatgcaacaatatctggtttttctccaatcacatttttgataaaatcagttataagctgaacatataaataattggtgtaagttaagtatggttttgcagaacgtccgcatccaagtaagtccaatgtgtagacagtatgtttcttttccagtttacggattactttgcaccattcataagaagaactgaccggatcaagatcatgaatcagcaataacggactccctgatcctcgtctggtataataaatctgtccatttttccaatcataaaaattgccgttttcggattttaaaatattcttaatatcggctgtcatattaataaatctgttaacaaaatggattgttccagcggcaagagctgtcagcagaaaaaaatgtttaatattctttttcataaaaacctcctcatttattttatgatcattaaaaatgtatttgatataatttgaaaaattgttttaccatttcataatcataaatgtttatttaataatattatatccgctttttataacatatacaaattaatttttgaaaaatcattcatttttttaacatattttgaaaattttagtttgcttaaaaaataatgcaactataactgtagtataattgtttttaaaataatgatatgatataataaagactgccgagcgacgaatgcccgtcagccagaatagcagcattattgatgattactcagaagtaaaggaacaagtgattatggttatagaatatttacagcaaataaaagattcttatttcgaacaaaaacatgcattagaaaaacagttaaatttattggaaattcaattaaaagaaaataccggaatgataaaaatgttggaggaaacaaatgattcgtgctatgaattgtttacacctagaaatgttaattcaaagaataaagctaaaattaatgaactgatggaagaacagaaaagtatcaatgagtctatagaaaatttgaaaaattctatcaaagaatattctagtaagatcgaacaattagatcagatagtggaagaagaaaatcgagaaattgaaattgttcaagaatatacggagacaatgtcacaacagaatatagtaagtgaagatgaaaagatagaatcatcggaagataatttacttgatggtatgaagaatattttgaatcgagtggagttatgcagccggttgattgatattgatccagttcgatgtagattggaattaggttctgttatgaaaattcttactgatctgattgaagaaaaagatgaatcggatttttgaaatatatatttctaaaagagacacttttccaaattaaaataaattcataaatctattaggtagataaattatatataaaggaaaaacacatatgagtaacaaaatatataagagtaagatgaaagatgaaaatagattacttggaaaaattgtgaatatatcattaatcgcattatcaattatctttgtgttattatttttgaaaataatagtaatggaaatatcatttcataaaatgattgcggaaatggttgaggggattgattattacattgaagatatagtaataacagataaagaaactgtagaggactataatggttcagaatcaggtgcaacgaattatttctttcactatggatatgatactgatatgcggatgcaagtaaatcaaaaagagtattctcaatataatgtaggagatatgttcccagcttatacaaaggatcattattattatggttcaacaattaattcggttttgccaaaaactgagtataaaaataatgaattaagtaaagccggtatagtaacaatcggttgtctaatactattactgcttatatataaatggattgataatttggaaaaaaagacaaacaataaatagtcaagaccgtaaaatgtttcacgtgaaacattttacggtctatgttatattttaacaatatttagtaggctcttataatgtgaaatactatagtttgaagtaacacaataaaaatatgaatgtttcacgtgaaacatttttggataattaatcatagcatttgaaatatagaagtgttataatatacaacgtagaaaaaaaaacaaaaatatctgcttataaaatagtaaaaatatccagctattatggaatgaaaattgattatatcatgaagcacaaatctatgatcgttatctatacccgcttcgctcggtagattatatcatacacgaaaaaacacatgattcacagaacagtctttatttatattataataaagaaacataatagctaataacagaactatgggaaaggaaaatataatgggtagaattatagcagtagcaaaccaaaagggtggtgttggtaagacaacaacagcaattaatctggctgcatgtcttgcggaagcaggaaaaaaagtattaacaattgaccttgatccacagggaaatatgacaagtggacttggagtagataaaaacgaagtggaaaataccgtttatgagttaatgcttgatgaatgttccattaaagaaagtatgacggatacagttatagacgggatgaaaataattccatcaaatgtgaatcttgcaggagctgaaatcgaattattaggtattccagaaaaggaatacatattaagaaatgctgttgattatatcaaagaagattatgactttatagtaattgattgtccgccatctttaaatatgctaaccattaacgcaatgacaactgcaaactctgtcctggttccaattcaatgtgaatattatgcgctggaaggattgagccagttaatacataccattgatcttgtacaacaaagattaaatccaaatcttttgattgaaggagttgtctttacaatgtatgatgtgcgtacaaatctttccaatcaggtagttgaaaatgtaagaaataatttagacgcaaaaatatatgatacactgataccaagaaatattcgtctggcagaggcaccatcttatggactgccaattaatttatatgattctaaatctgccggagcagaaagttaccgtttacttgcaaaagaagtaatagatagaaaggatatttaaaacatggcaaccgcaaagaaaaatggattaggcaagggacttgattcacttattactaataaagtaaatactacaaaaacaacagcaacagcaaaaccagctactaaaaaagatgaaaaagtagtggaaggtgtacttgttaatatcaataaagtagagccaaacagagaacagccaagaaaaaattttgatgaggatgcacttttggaattagcagagtctatcaaacagtttggagttttacaaccattacttgtacaacagaaagatgattactatgaaatcattgccggtgaaagaagatggagagctgccaagcttgctaatttaaaagaagttcctgttattatcaaaaagttgacagaacaggaagttgtagaaatttcacttattgaaaatatccagcgtgaaaatttaaatccaattgaagaagcaattgcatataaaagacttttaacagaattcaatttaaaacaggatgaagttgcggaacgtgtatctaagagcagaacagcagtaacaaactccatgcgtttattgaaattaaatgaaaaagttcaacagatggtcattgatgatatgatttctaccggtcatgcaagagcattacttggtattgatgatctggaaaaacagtacacaattgcccagcagatatttgatgaaaaattaagtgtacgggagacagaaaaattagtaaaaaaaatccagcaggaaaaaaatcagaaagatacagaaaagaataaaaaaatagatccaaaattagaagcaatctgtcatgacctggaagagaagatgaaaggaattttaggaacaaaggttgctattaatcagaaggataacaaaaaaggaaaaatcgaaattgaatattattccatggatgaactggatcgcattatggatttgttcagaatcattgaaaaataatagagtatttttataaaaaaatcaacaaaaataggctcattatatagaatagcagaaggagaaaaaatgatttcacagtatttaggatttgattcagattatattatcattggactggcagcacttgttttaatacttattattttaatgattataaatgtagttcaaatgagtaaattgaaaaagagctataagatttttatgaaaggaaaaaatgcaaagaccttagaggatacacttattaaaaggttaaatcaggtagatgatctgataaatgcaaattccgcaaacgaaaaaaatataaaaaccttattccagaacatgcaaagaacatatcagaaaatgggacttgtaaaatatgatgcatttaatgagatgggtggcaagctgagtttttctctggcaatgcttgatgtgaaaaataatggatttatcattaatgcgatgcacacaagagagggctgttatacttatattaaagaaatcattgatggaaattcagtgattgttttatctggtgaagaacaggaagcattaaacaacgcaatgggggaaaataacattgcaaaatagaaagacatattatataataaagtccgtcttgtaaatagtaaaattggtttacataattttgaaaattggaaaggaggatagtagtatgcacaaatttttaagagcagtcggtttttcaaaaatcacaaaagaagagctgaatgatatttttcaaaaaataatagagagaccaatgctgcagaaagtggcagaggattccgaaggtaatgagtttgcagaactctctatcgagtttggtgatttctttggactgtctttgagaggaacatttaatgagaatgattcttttgagatgagctactactatccttatttttgtggtaataaaatttcaacgacggaacagattgatattgaaaaacatgcggaaaaagagtcttatgcaggaatctgtgatgaggtaagacttggcgttacattgattttttatttgcagaatgtggcggattatctggctgtgaaaaataataaattttacatgagtcaggcaaatggaacagtgcttgctgcactttccacagaaggaaaaattttacttcctattaataaagatgaacataagcagaagctgacagaacagactatgaacgaaagaaatggattgatcgctgcagccagaaagggagatgaagatgctatcgagaatctgactttggaagatatcgacacttattcccttctttcaagacgtgtacagcatgaagacattttgagtattgtggattcttactttatgccttatggaattgaaagtgatcagtattccattcttggtgaaatcatggattgcaggctattgcaaaattcgtatacagaagaaaatgtttatgcgatagatatcaaatgtaatgatgtagaatttccaatctgcatcaatcagaaagatctgattggtgaaccagcagttggaagaaggttcaaaggaaacatctggttacagggaagtattaattacagagattagtgatttaaaaaaaatcactaatctgaagaaagaaaaagattgaacttctctgatagttggaatataataaacaagtatctgttctcatagttaaatggatataacaagtgcctcctaagcggcagattgttcgattccttcgagccttgaaaattgcataaaacttataaatgtctcagtagctcagttggatagagcacacgcctcctaagcgtggggtcggaggttcaaatcctctctgggacgccagaaagcaccgctgcaagccttttttcggggtttgcagcgtttttttgttcctccttctcccggtaatttcacttccgttaccgggagatttttatacgccgcatgatgtatatttgctaattggactcgaacgcttttcagaaatttgctaagaaaattctgcgttttgctaattcgatttttcggatcactttgccggggcttgcgccgctatcagggctgcgagcgcactcgccagctccggcgacttctgaagctgctccacaaggctttcaaggtccagggtcgcaggctccgcttttaccggttcctccggcggacggacgttgcgaagatcaggcttggcatagaaggcagtctcgaatttctgagcattgacctttctatcctcgtccagaatgtgagcatagatactggttatcat

SEQ ID NO: 14314 - DNA, 11247 bp, Unknown
  gut microbiota DNA sequence
ctcaaactgtctaatctatagggtacattttattccatcccggtaaaagtccacataaaatccgtcataaactctcgcttccaactgttttgttgcaactgaaacataactgccgcagtcttttacctcaaaatctgtccggaccgccttctccccttcgattgccttggagcggtgtccttttgtctcataaggaacaaagacatttataatactctcagtaatgacctctaaaaatgcctcctctttttcaaagaaaaaatggattttattttcttccacctgataatccaaacgtttacccaacatatgtgcatcctttctcacgtataaattttcgtattttttcgtaagaatattttagcatgtgcagacgtttttttccatagatatttactgattttttgccatgtcctgaagttcacgcatcagatccagatccgactgctggatcttcatattggtcgtcatcggctcctcacccggtctggtgagtgtgatctcgatcacagtgccctcctccatctctctggagaataccgcacttaaaaatgccacaaacttcggatgatttgcagtaaatttattttttgcattcataatcttcataatatttgccgggttcatcataatcttttgtccttctctttccagatgcctaaagcatcttctttttcttaaaataaataatttccaaaatgatcactaagatactcactattataactgccggatacgcatatttccacccaaactccggcatatttgggaaattcattccataccagccggcgatcagcgtgagcggcagaaaaatcgttgtcacaaccgtcaaaatgctcatcacctgattctgctgcaccgcaatgagtgactggtaaagttcccggatctgcacaagatattcccgcagcatttccacatggtcatgcagccgctccgcccggttggaaaataactgccactgtgctttttcctcctccgacagaccaccgttcacagatgtctgcatgacgtctcccatattcatcagctgttcataataggcatgaaaaatattgaaccgtttccggtatttcatgatcatctcataaaaatagtccggtattttctttaacagttcctcctccagaccagccagatgttcctcctgtttctgcagatacagtacttcatcctgcagcagttcctcgaataatgccagaaggatctgccggaagctgtaaccctcgtaggtgccttccgccatcttgttcagatactccatcagaaaatggctttcctccacaagatataattcctgctctgacaggtaaaatccaaaattatggatacacacctgtcctttatttccctttggcacacgcattgttccctgcacacactcccggtatttttcaatcttgcagtactggatcggtgtcatgctgtggataaaattatttttccgcacaagtttccgcggatggctcaaaaactcatccagactcatgagataaatgctttttcctgcgttttcactattttgtactgttttcttttccaatgtgatttttccagtttcctcatgatagctatattgttccatatgattttaacctcgtaatttttatatatatcattccttacaacctgcatactcccaggtaactccgttatccgcagactgaaaaataatcccctgctgttccatcgcatcagtctgcagataaatctccatttttccatccacgatctgcggcatggtgtgataatcataatcttcgattgtaaatcccagttcttctgcttcagatggaagttcagtcaccgtatccaatggaagttccagccgttcaaatgtctctccgccatccttcgtcacataaagcatggagaaatcctcacttgcatacgtcagtcctgcaaatccgaaatcattcgtaaaaaagagcagaccttcggcaacgcccatattctggtcaaacggatcaccgttgacctccgtccaggtcgtaccgccatccttcgtcttttcaaagttataaaagcggcttccacaggcagcatctaccacattcagccggtaaccggtaatatcattgatgaaataatacatatcgccgtcttctgcattaaattcccacgtatccgaattgcggatattctcactggtctttgtttccgtttctgtctctgttccgctgaaaatttccggctcgttttcttccttattagtatcactattatctttggaagaactctcgtcatttattctccgccactcataaattttccaggagagtgccccattgtatgggattgccgtgcggatcaccgcagcgccacagatgatcgttgccgctcctgccgccacaagttctgcgatccacagatattgttttttccccgcctgctgttcttttgccttttttctggtgataagccagaagagaaaaccaactgccatgaccgctgctcccacagccattttctgtccgtggtagcgtactcctccaaactggcataaaaaatagccttcgtataaaatgtaaaaataacctgctaatatcagcaccggactgattttgtgtatgactttcattttcttttccctcttttttcaaaatggatgttacggcttttcagaccagactgtttcgtctttctgctgcttgcattatattgtttttgtgtgcatttttcaatcgtgaaaagcgggtttggatcgtatttttccactcagatctgtctgtatctctgtcaagcgcagatgatgacaaattttcctccataaattgctaaatttttaacaatttttttattgattttataaccgagatatgtataattatggtagagaaagttggcaatttgcttatgtttcctgcatttcacaatgtggaacagagcgatcaaaagtccggcttccaaaaagatatgtacagtctgtttttacagattgataccatattacacacagcgaaaggaaagaggtaattaaaaatggcaaaaattgatttaagcaagtatggcattaccggaacaacagaagttgtttacaatccttcttatgaattattattcgaagaagaaacaaaaccggaacttgaaggttacgaaaaaggtcaggtcagcgaacttggcgcagtaaacgtaatgacaggtatctatacaggacgttctccaaaagacaaatacatcgttatggatgagaactcaaaagacactgtatggtggacttctgacgaatacaaaaacgacaaccacccagctacagaagaagcctggaaatctgtaaaagatttagcgatcaaagaactttccaacaagagactttttgttgtagatgcattctgcggtgctaacaaagatacacgtatggcaatccgtttcatcgttgaagttgcttggcaggctcactttgtaacaaacatgttcatcaaaccaacagcagaagaattagagaacttcgagccagatttcgttgtttacaatgcttctaaagcaaaagttgcaaactacaaagagttaggattaaactctgagacagcagttatgttcaacatcacaagccgcgagcaggttatcgttaacacatggtacggcggagagatgaagaaaggtatgttctctatgatgaactacttcttaccattaaaaggtatggcttctatgcactgctcagctaacacagacttaaatggtgagaacacagctatcttcttcggactttccggaacaggtaaaactacactttccacagatccaaaacgtctcctgatcggtgatgacgagcacggctgggatgacaacggtgtattcaacttcgagggaggatgctacgcaaaagttatcaaccttgataaagattccgaaccagatatctacaatgcaatcaaacgtgacgcactcttagagaacgttacattagatgagaatggtaagattgatttcgctgataagagcgtaacagagaacacacgtgtgtcttacccgatcaaccatattcagaatattgtacgtccaatctcttctgcaccagctgctaagaatgtaatcttcttatctgcagatgcattcggcgtacttcctccagtatctgttcttacaccagaacagacacagtactacttcttatctggattcacagcaaaacttgctggtacagagcgtggtattacagagccaacacctacattctctgcatgcttcggacaggctttcttagagcttcatccaacaaaatatgcagaagaacttgttaagaaaatggaaaagagcggagcaaaagcttacctcgtaaatacaggatggaacggaactggaaaacgtatctccatcaaagatacacgtggtatcatcgatgctatcttaaacggagacatcaagacagctcctacaaagacaatcccatacttcaactttgaagttcctacagagcttccaggcgttgatccagcgatccttgatcctcgtgatacttacgctgacgcttctgagtgggaagtaaaagcaaaagacttagctgcaagattcgttaaaaacttcgcaaaatacgaaggaaacgaagctggtaaagcattagttgctgctggtcctcaggcttaatgatctgttaatatccattaatttgttttttagcttaaaagaaaccggatgtcacattgcatccggtttctttattacacatatttggagttctatcatgttaaagaagttcattaaatacgtctctcaaaatatgcttggtatggtaggtatgtctgtttatattcttgcagacacctactttatttctgtagcggtgggtgccgacggtatcactgccttaaatctggttctgccaatttataatattatttttgcgatcggtgcgttgatgggcgttggttctgcgatccgttttgttgtggaacgcaataaaaaaagcccggatgcagatggatattttttccatgctcttgtgtgggcttttatcatcagtctgttttttatttttgtcggcctgtttcttccggataaattgatcgcactgttaggcggtgatgcccaaatcgttgccaccgggaaaaattatacaagaatttttatgtgctttgctcccttttttatgtggaactacatttgtaatgcttttgtgcgaaatgatggaaatccttccattgcgatgtccgcaactttattcagcagtctgttcaacatcgtgtttgactatatcctgatgtttccactgggactttccatggaaggtgctgcacttgcaactgccttctccccgatcatcggcattgcgatctgctgtatccattttaaatcaaaaaagagcacaatccgcctaaaaccggtcctgccttctttccgcagactgctgtactgctgtcaggtcggcgtttcctcttttgtcggtgagatttcctccggggttatcacggtcgtctttaatatgctgatcctcggtcttgcaggaaacaccggagttgccgcctacggcgttgtagccaacacctcactggtcgcagtcgccctctttaacggcattgcgcaaggctcccagccgctcatcagtgaagcttacagcaagggaaatcacaagaatgtaaccacctatctgaaaatggccgtcacgaccacgatcggcgttgccatccttctggtggtctgcatttacctttatgcccctgtgatcaccgctgtatttaacggagagggaaatcaggtgcttgcctcctacgcagaaaacggtttaaggttatatttcattggatttctctttgccggaatgaatattgttggaactgccattttaagctcgatagagtctgcaaaatatgcattttttgcatccatctcacgcggatttattgcgatcatcatttttgcatttgtgctatctgcactgcttggattaaatggtgtatggctcgcttttcctgctgcggagtttgtgacgatgttaattacgttgtatgggctggtgaaggcgatacgaaaatgtaactattcagagccaaggcaattttcataatttgcgaatcatgcttgcatgaatgagcataattttgaaaatttctttggcgaagtaaccacaatgagcaaataacaagcatgcttgttattcaaggaaagcatcgaagatgcggttttgcgaatggggtgctgaatagttacatgagaaagttattataacgccttcttaatcgcttccatcagctgctcataagtttcgtaggcctctaattcaggattatcctttttgatctgttcggtgctcttaaataagaatccggctttacttgccttgatcattccaagatcgttatggctgtctccgcttgcgatcgtctcgaatccaatcgactggagtgcttttactgttgaatacttggaattttctactctcatcctgtaacctgtaatctcgccgttttctgccacttccagtgaattgcagaaaatagtcggccatcccagctttttcatgagtggtgcagcaaactgtgtaaatgtatcactgatgatgatcacctgtgtcatgctgcgcagttcatctaaaaactcttttgcacccggcatcggatcgatctttgcgatcgtttcctgaatttctttcagtccaagaccatgttcttttaaaattccaagtctccatttcatcagtttatcataatccggctcatcccttgtcgttttctttaactccgggattcgtgtctcttctgcaaatgcaacccagatctcaggtactaaaacgccctctaaatccaggcatacaatattcatatccatttttttccctcctcaaagctccatcgtgtcattgaaaaacagtatattgtcattctattatatttcgtgctacacttcaagaagtgattgtaacaaaggtgcaaattgcaatatcgtaaagtcttgcaatttcttcatcactgcagcttatatttttggattgtcaatggaagctatatgcgtcataagattccataagtatttgagctgcctctgcatcgctgacatccacaatatcactgacatctatccatttgaaatgggcccgatgttcggaagcttgctgtgcttcataatagcgcgccgcataagtgcgatactcatcctctgtcagctctgtcccattgtaatcctcatagcttatcgttgcttcgtaatccggaccttcatatgtttcatattcaatggccagttttgtttctgttacaacatcatcaacgattgcaagcgaactgacccggtatacataactgctcggtgactccttcatgagatcgtacacaatataattataatatccttttccatttatgatattagaatataccatcacatcactttcatccgatatctgatccataagatccggctgggattcatattctgaaaaagttgtatccagttcttttagttttccatccttatctactttgtaaaaactggtataagaaaaaattcccgtgccgccacaatgcgaaaccaaaagttccacttgtccatccatatccagatctgccagcgtgaatttatattgttcattggcaaaatcaatatcaactgcccacttgtccctgttttgtgcaaatatctcaatctgcttttgaatatctttagtagctccagatatgctgtccacatattttacataatctgtccatacgccttccatatcagaaagcttttctgtcagatgctgctcgcttagaaattcttccaaaaaagtatcccgataaaacggattaccattttctgttttcgcttctactttatagctttccagatttggataatccagatacatcatattgtccggattttcctgtaaaaatataaccggcatattccatgaatctccgtcattactatattggagcagcagtaaaatatcctttttcccatccatattcacatctgaaaatttgacgccactgacctgcccaaatgaatccgatattgctgccgttatttccggaaactcatacataattttatcgtttttcatcaataagaattccggcttatttgaattatcttctggtgcaactgatgtaaatgttaccattccccagtcatccagctgaatctcaaatgtctgatcctcaatcactctctgcttgaggctttgcatgttctgtcccggtgtctctgtaaccgcttcctgcccaccggacaattcttttaacacttccgttgatgcttcttttgcatcctttgcttcctgcttacagcctgcaagaacaaatgatactattatgagtccgaatatgatgttctttttcatctgactgccccaccttttatcgtttctcggtatctataacgtcatctgactcctcttctcttattttatcatacctaattcttctatgcatctttttctgttttttcttccattttgtatccgattcgaaaacctacacatattctgcaatagtatgataaactatcactataaaaagccattcggtgaagaataagcttcgccttggatgggatacaaattttaatgagggggcatccatgcaaaaagagaacagaaaatattacgaagcctatgaagatcgatataaaaccgctcatgaaaagggtgtcagttgggcacagatgaaaaatactccaattgttatggatattattagtcgatatcaccttcatcctgagcattcattactggaaatcgggtgtggtgaaggcagagactcctccaccgttttagaaaatggctttaaccttatggcaaccgatatatcgcctgaagcaataaactattgtaagaaaaaaatacctgattttgaatcaaaatttatggttttggattgtttatcaagcgatttggatatgaagtttgatttcatttattcaattgcggttattcatatgttagttttagatgaagacagaaacgggttttatcaatttattcatagtcatttgaaatcagatggaattgctcttatttgttcaatgggagacggaaaatatgaaatgcaaagcgatatcagcaacgcttttgagattcaggaaagagaacatgaatctggaaaaatgatggttgcgggaacatcttgcaggatggtttcattcagtacttttgagaacgagctgctgagaaacggactgaaaatcattgaaaaaggcatcacaagtgcattgccaaatttcaatagcttaatgtatgctgtagttcagtagagagcctatcgaaaagcagcagacaaactgacggaactcaaaatcagctatattccgctaattctcgtattccgagagtgattctaagtctattgggtggtgttctcactaccgaaatcttagaataaagacacagaaagcaaaccatccatccaaatgatattgaccgcaacgaaaaagtagtttcacttcgatacactcccaaggatggaaccattctcccactcccctgtctttttcaactcgtcataataagctttataccagtatgccgtcctccggctgatcgcccctcattcacaatctccatgattttcatgccgctctcaaattttatttggttgctgcctaccatagaaatcaatgtctctctgcagctgttccattgacatcacttctttcagatcatagcggcaatggattggtgcaacatttgtgaaagcttatcctctgcagatacgcgtgcaataaatttgcccatatacgttcctatcatatccagattgatgttcaatacgattttatccagttcctcctcgtaatctctgacatatgctttagatccaagcagaccacgctcctcaccgacaactacctcacgaagatctcgctggtcaatatcctgctatagatagtgaaggtttccatactggaaaagaatagcttttgccctcgctttcatcagatcctgatagttaaaaaattcattgctctcccccttcctctacttccatcagatttatccttgtaaaaaattctgtctcattttcatgatggatatatgccccgtttttcatctgaacacgaaggcttgccggattatccttatttacagacatataaacttcgtgaatagacctctgtcctgctttctcaagcgtcagcttcaatcccttagttgcataacctcttcctctgtatttttctgatatgcaataacctatatgtccaggtccttctctgagaaaatcattgagacaatgtcttaaattaaatactcccacatatacatcttcatcaacaagcacatatgtagtatccggaacaaatccttccggcagctcctttcctaatgaccagtttctctttttctcgatccattcaagaaactgttcatagttatagccatatacgttattcatatatccgttttcattttccggaaaagtcatataaagctcatatgtttttcgataatcagaatcctgtactcttattaattccatgggcaatcctccttgtgtttgttctgtcgggcttattgaagatgatatcactcatatctcgtctgccttcttgaaattattattcaaaagtataatcatggtatttcttcatgtcaattgaaaatcatttgatttttcatatatgctccaatcagctcttatttccatgtaaaaaagagaaaatgggctgccacaaaatgtggcaacccattttctctctttatattcgttgtgatcagattgttcctgtcacagttaaggttcctgttcccggtgtcacgatccagctgccggtagccggatcctgcgtataagctgccgcaggcaccgtgattcttccggctgttgttgcaaataatccggttgcttcgttgtatgtgtaatctgttccggccgcaagtgctgttccattatagcttaccgctatgttggaaaggatcggatcgaacgtatctatgatctctgctgctgtggctgcatccgctgcagtatttccggtgttctgaatgaggaatgtgtaggtcagcgttccattttccgttaccggaaccgggctgatcgatttcgtgatatttaaaagcggctcattatctgttaccactgtctctgttacctcgatcggtgtaatgcctccgcctgtgattgttgctgtatttacaatatttccggttgcagcaagcggtgcatacggattcacttccgcttcatatacgatcactgcattgccgcctgccggtactgtgatcccatttatcacaagtggcggtccggctgttactgcaggtgccggctgcaatacaccattgatataatacttcgctgttccctccatataatccag

SEQ ID NO: 14315 - DNA, 595 bp, Unknown
  gut microbiota DNA sequence
gcgggaacagtatgatgtattgcttatgatgtgtgatactttgttaaaaatgttttcatggccagactacacaggttctgatctgaaattcagaaaaagttgtgtgttagaggctctcggaagaaaaaacgaagcagtttcattctgctgtaaatggtttgaaaaagaaccggaaaatatcatggcagcgaccgcttatgtctatgcattgatcggggcaaaagaatatgaaacagcagaaaaactgattcatcagttcatcatagacgaatcagaatgccttgaggaaaatgaaattatgttccgtgccgcagcaaagtattatggggcaatcggggacaaaaccaaaaagaaacagttagataaagtgttaaaagaatacgaagcctatgtggacagaatgattgaagaagaatggttaggcagcgacgaagatgattggtttgaggaggaagagcttccgtttgattaagatgtgtggatgatatatgcatttgccggatggataaaatagtcaggctgatagaaaatagtccttgcatttctgttatgcacgtgtataatgaaattattgttgaaaacaatcaatcatcac

SEQ ID NO: 14316 - DNA, 10554 bp, Unknown
  gut microbiota DNA sequence
gggtgctcgcacaggcgggctgagagtaagcggatgctttaacccagaacctgatttggataatgccaacgtagggagataatgaatcacaagtgtgttttttgtgtgcaggaatctttggttgggttcctgcattttttaatatgaagaaggcaaacagcatgaacatcacaagagaacagttaaaattatacgctgtcacagaccgcagctggcttggcagtgagacactgtatgagcaggtagagaaagcgttaaaaggcggcgtgaccttagtgcagcttcgggagaaaactctcgatgaggctgcttttgagaaagaaggacaggagttattagaactttgtcatcattataacgtaccgcttatcatcaatgacaacgtggaacttgcaaagaaaatccatgcggatggtgtccacatcggacagtctgatatggagataaaaaatgcaagagagcttcttggagcagataagattatcggtgtgacagcaaagacgatagagcaggcaaaagcagcagaagctgccggagcagattatcttggaagcggagctgtttttggaacaagcacgaaaacagatgcaaaaccgatggaattagatttatttcaggaaatctgtgagagtgtaactattccggttgttgcgatcggagggatcaacgcagacaatgtccttcggctgaaaggcagaaagatggcgggagcagcagttgtcagcggcattttcgcatgtgaagatattgaaaaaggaacaaaagaattacttgaaaaagtagagagaatcatttaattaggtaagaactgcagagcagtttttatatacagcggcagattgggggcaccaccttaggtcgctatacaaaattaatgcaaaagaaggattttttcttcggaaaaacaaggaggattttatgtttacagcattaacaatcgctggaagtgattccagtggaggcgccggcatccaggcagatattaagacgatgaccgcaaaccgcgtttacgcgatgagtgcgatcacggctttgactgcccagaatacgaccggcgtaacagatattatggaggtaactccaaagtttttggcagagcagctggatagtatttttacggatatcaatccggatgcaattaagaccgggatggtttcgtcaagtgaactgatcgagacgattgcggacaaactgacagaataccacgcaaaaaatattgtagtggatcctgttatggtggctaccagcggagcaagacttatcagcgaggaagccattggaacattgaaaagtaaattattgcctctggcaactgttatcactccaaatatcccggaagcagaagtgctttcagagatggagatcaaaacagaagcagatatggaaaaagcagcagagaccatctgtaacaccttaggttgtgcagttttattaaagggtggacatcagttaaatgatgccaatgatcttcttttccagaaggggaaagagccggtatggttccacggaaaaagaattgacaatccaaatacccatggaacaggttgtaccttgtcttccgcaattgcatcaaatcttgcaaaaggaagagacttggaaacctctgtcaagtatgcgaaaaactatatttccggcgcacttgccgatatgcttgaccttggaaaaggaagcggccctatgaatcatgcatttgcaatcgaaggagaatatgaaagatgagtgaaaaaagaacttccgttttttcaaacggcttaatctggtttggggcaggagtatctttagctgagatcctgaccggtacctatttcgcaccacttggttttggaagagcaatggcagcaattctgctcggacacctgatcggcggactcatgatgtttgccgcaggaatgatcggggcaaaagagcggaaaagtgccatggaaactgtaaaaatgagtttcggtgagaagggaagccttctctttgcggtattaaacgtgctgcagcttgtcggctggacagcgatcatgatctatgatggcgcactcgcagcagacggcctgttacatagtggcatatggatctgggcaattgtgatcggaattttgatcatagtgtggatctttatcggactgaccaatcttggaaagttaaataccgttgcaatgaccgcactttttgtattgtcactggtactttttaaggtgatcttctttaatacagattttgtaatgccgatcgcagtaagtgacgatatgatgacttttggagctgccgtagagcttgcagtcgcaatgcctctttcctggttaccgcttatcagcgattatacgagagaagcagaaaaaccattcgcagcaacctttacaagtgtactcgtatacagcgtagtcagcatttttatgtacatgatcggtatgggagccgctatttttaccggcgaatacgatatcgcacagattatgttaaagacaggtcttggcgtagtgggattactgatcattgtattctcaaccgttacaacgacgttcttagatgcttattccgcaggagtttcctgtgtttccatttcttctaaaattcaggagaaatgggcagcgatcattgttacagtgatcggaacgatcgcagcgatcgtttatccaatggataatattacaaacttcttatatctgatcggatctgtttttgctccgatgatcgcagtgcagattgcagattacttcattttgaagaaagcggattctgaaaagaatgctttccagtggcgtaatctgatcgtatggcttgccggatttattatttaccgcatgttaatgcacgtagatactccgcttggaaatactctgccggatatggtgatcacagtcgttctctgcctgattgtggaaaaggttgcagaagcaatgcgaaaatgaggacgaaagaatgaaaaaatctaacttaaagaaattaacagtcacagcaattttagcagcagtagccgtagtgggaagcttattttccttcccggtattcggttcaaaatgtgcaccggtacagcatatggtaaatattttatgtgcagttactgtaggtccttggtgggcactggcacaggcatttatcgcatctttgatccgtaacttattaggacttggaagcccgcttgcattcccgggaagtatgtgcggtgcattacttggcggtctgctgtataaatatggaaagaaacttccgtttgcttacattggagaggtagtgggaaccggtattctcggcggaatgctttcttatccggttgcatatcttgttatgggaaacacagcagcaacattgtttatgtttgtagtgccattcctcatcagtacctgtggaggaacgatcattgcgatcattatcacactgccattaaaaaaatcaggtatgctcggaaaaatgaaggacagtctggaagagtagatgaaagttttctgcccactccttaatttcttataaaggaagaaaaaaatgcaaaataagaaagcctgtcgggatttatgtcccggcaggctttctttacatgtaacattatgaaagggagtttccttttttgcaacggagaattccgagaagcagcagtaccggaaagataattcctgccagaatgcccattttcaggttgtctcccaaagaatctgaaatcattccaaccagggtaggacctcctgcacaacccatatctccacctaatgccagtaatgcaaacatagcagttccaccttttggtaaagctgcggatgctttgctgaatgtcccgggccacatgattcctacagagagcccacagaccgcacaggcaatcagattcagtaacggagcccggaacaatgaaatccccagataggataaaatacatagcagacaactataaatcataaagtgatctaaattgatacgatcgccatacttgccataaaataatcttgaggttcccattagaattgcaaaagccatcggtccggctaaatctcctgcggctttggaaattccaagtcctttttcagcaaaagccgaagcccattggcttactgcctgttcacttgccccggcacatatcatcatgatcagtaaaatccaaaagattttcagccggaacaattcttttaatccaagaccggtttcgccatcctcaagcagaggtgcgattggtacctttgcaaaaacaaaagcgtttccaataggaatgactgcccagataatagctaatattttccagttatctatacccgctgcatagaaaaacaaagttgataaaagtacaactccggcatgtccccagcaataaaaagaatggagcaggctcatcgctttctctttattatcagacgggcaggcctcaacgacaggactgaccagaacttccagaagtccaccacctatggcataaatcattactgcaatcaaaattccgataaagggaaccggtaaaatttcaggtaaaactgtaagaagaagtaatcctgccgctgcaagggcatgagctgcgatcatggatacccgatagcctattttatcgatgaatctgacagaaaggagatccaccagtaattgtattccaaaattaaaagtcaccagtaaagtgatctgggaaatcggaacatggtagcttttctgaaaaaataagaaaagtaatggtgtaaaattgttcacgacagcttgtacaatataacctacaaaacaggcagtgatcgtcttattatattggtttttcatttgtctttattctcctttaacaaatgtgattatatcgcaaaaattgtgtgcagtcattgtacaaaattgcatatttatagtacaatatggtaaaaattagtatttataaggaaatacattatggactattttaagataactacagatgaaacactgcgggaaacggttcagcatggcagtgaacgttatccttttgcatattatcctgaggatatctggcaatttgattttcaccgtatcgactggcactggcatcatgagctggaatttctttatgttgcagaaggcacagcaatctgctttatcggtacaagcaaagtagaactgcataaaggctgcggcatatttattaatagtggtgtgttacactgttttgaagcacgatctagcacatatacgcctaatattgttttttcaccaactctgctggcatccgaaaacagcctcatttatgaaaaatatattctgccggtgataaattcagcagtagaatatcagatttttgatccaaacagtacatcagaaagaagtgctttacagcttatgttacagatttttgaacttcaggaaaatgggcaggataatgaattatgtaccatacaacttctgttgcagttctggaatatattgtttaaatatagaggctggaattctgatttggacaaactccagcagccaaatcataatcaggcaagactgcaaattatgatgcagtatatacatgaacactatgcggaagaaattacactggaaatgattgcggcatcggtatctatcagcaaaagcggagcgttacatatttttcaatccggcatacattgttcgccggtagcgtatctgattcaatacaggctggcacaggctgccagacaactttataccactcaaaaatcagttgcctccattgcaaatgaaaccggatttacaagtgccggctacttttgccggaagttcagacagtattataataggagtccaaaggaatacagaaagaaaaaaacggaagaaagttcttaaagtttgctttataactacacattataaaaagcgtgtgttatgataaggtctgatgtggaatcagaaatagataataaaaaaatgacagagaaaatcagaacactacataagagagacgaggaatcatgagtatttcagaaaaatatatagcagagctttataacaaaatacaggaagagcgaccgatcatccattgtataaccaacgctgtgacggtgaatgactgcgccaatattttactggcagcaggcgcgtcgccaacgatggcacatcatccgcttgaagtggaagaaatcaccgcgggtacgaaagcacttgtctgcaattttggtgcaatcgctgattatgaggcgatggaaaaggctggaagagtggcagatgaattaggacatgccattgtcattgatcctgtcggggtatccggttcgagttatcggagagaaaagtgccagacattgatcgaaaacatccatccaacctgtatccgtggaaattattcggaaatccgggcactgatggagcattgcagtacggtgacaggtgtggattccggcgataaaaacctggacacagaggcgatgcggcagtatgcagacaaatatcatctgatcatgatcgcttccggggaaaaagatattatcacagatggaaccgccatttatatttgtgaaaatggggatgccaaaatggcaaagatcacaggcagcggatgtatgtcttcggttatgctgggggcgtttttgggaacagagccttccgtgcagagcgcagcagcctgttgtgcgtttgttggaattgcaggagaacttgcatcggaaaaaacagatgcatgtggaggtggaaccatgacgttccgcaactttttcattgatgaagtatctttgatgacacaggaaaaaatgagtagatgtagggtacacatatgattacattaaatgattatcacataatgtatacaaagaaatgtttgaattagataaaaaattcgtgaaatttaaactattatacgaagaaaaagaatatgctattataattacacgacgtgcagccgaacagcgatcgcagagattgttgtccggctgcatttttgtctgtgaaaaataaaggaaaagaggagaataaaattatgccaaaaacaaaattacaggaagttgtttttaccattttgatggtatttgtcatggtttacgccatgatctgttacaacattgcactgaatatgggaggaatgagcaacatcgtattcttaaatgcatttcatgaattagtgatcatgggaccgatcgcatttattttagatttctttttatatggaagtctttcaaaaaaacttgcattccgcattgtgacaccgggcgtggataagccaatcatgattattttagcaatttcatccatcaccgtatgtctgatgtgtccaaccatgagcttttttgctactttattatttaagagtgcaggaaaagaatttattgcggtctggtttcagacaactgctttgaactttccgatggcatttttctggcagatcttttttgcaggcccacttgtgcgtgctatattcggaatgattttcaaggaaaaagaaccacaggttatgaaagaagaagcggaatacttagagggcggagaagccagataatccttaaaaggtaatactatgtccggtatttggaaaaataagtgcggcagcgcagtcagtaacaaaaatgaaaacccaaaacatattccatttttttcgaaaatccagtgaaatatgataccaccatttttgcaatatttttgaaaaaatgcaaacccacagaacgcctgcaatgccaaaacctaacgcagaaaccagacagatatacccacggaaattaagaaaatatccgctgtaatcccaataacgcaaattccacaagagatcaagaaaccatccgatcacaagttctaaaccggagcctaaaagggcagagaggaaaaagacagtgacagggtggtttttcttatgttttcctgaagaatctggcaataattcacgaggggataatacaaccgaaaataaaactgcgccaatcccataaacaggcagccatggaccgtagagaaaaccacggtttcgaaacgttccttcttttagaaggaaaatcagaacctcccacacataaccgcagacagagcctgtgaaaaagaaaaaaatcatcagtgaaaggacattttgtattgtattctgctccggtctgcggaggctggtaaaatccggaaggtgtttttgctttttcatggaataagtatgctgccggagaagaaaattatgtatggagtaataagagaaatgtgaaatgaataagatggcacacctgacatttgctaaaatagaaataaggaaaatgaatcggaaatggaaatctcaagtgaaaaacggagatgaaaagtagaaagcggaagtagaaatcagaaatgaaaaataaaaatgagaaatagaaatcgaaagcaaaaatcaaaaatgaaaactcaaaatggagatcaggagcaaaaatgattgacagagaaaacagatcagcgtatgataagaaacactaattttcagaatattttaaataatacaatgcacgcttgcgaatattctgttgaataaaaacaggttttgggagatgctttgtgagacatcaggagggaaaagaatggatttacaattagtgaaaatgagtgaaaaattcaaaccacagcttttggatatgatggatgaatggacgaaaaccggggaaaccattattccatgggcaatccggaaagtcgattatcatgattttgatgcttatctgaaaagtctggaagaatcggagccaaaagagggatatgtacctgcatccacttttttcgcatatgacagggaacgcgatattctggctggagcagtggatatcagacattcccttaacgaagcattattgttagatggaggccatatcggagacggcgtgcgtccttcggaacgaagaaaaggatacgccacagaaatgatcgctttagcattagatgagtgcagaaagctgggaatcgaaaaggttcttatggtatgtaataaggaaaataccggttcagcaaaaagtatcaggaacaacggaggagttctggaaaatgagataaacgtagagggtgagacggtacagcgctactggatacagctgtagaggttatgatcaactgctaaggttacgatcaactttaaaaattacgtgccaattaagaaaaactatgctacaatgaaacgagcggtaattccatttgataatccagataaaatggaactatcagaaatactgttctggcataaatcaggacattacagaaatgaaaatacaggaggacaaagggctgactatggaaaatatcttttcccaggaaaaagtaatcgtcatcgacttcggcggtcagtacaaccagctggttgcaagacgtgtcagagaatgtaacgtttactgtgaaatctattcctatcgaacagacatcgagcagatcaaagccatgaatccaaagggaatcattttgaccggaggaccaaacagctgctacgagccggattcaccaacctataccaaagaattatttgaacttggcattccggttttgggactttgctatggtgcacagttaatgatgcacgtgttaggaggcaaagttgagaaggcaccggtgcgtgagtatggtaaaacagaagtaatggtggatacaacttctccattatttggaaatgttgcaccgacgaccatctgctggatgagccactttgattatatttcaaaaccagcaccaggttttaatattgttgcacacacggcagactgcccggttgcagcagcagaaaacagagagaaaaatttatatgcgatccagttccacccggaagtactgcacaccgaagagggaagcaaaatgctccacaacttcgtaagaggcgtgtgtggatgcgccggaacatggagaatggattctttcgttgagagtacgattaaggatatccgagaaaaagtcggtgatggaaaagtacttcttgcattatccggcggtgtagattcctctgttgcagcaggacttttatccagagccattggaaagcagcttacctgcgtattcgttgaccacggtcttctccgcaaagatgagggagatgaagtcgagagcgtattcggaccaaacggtcagtttgacttaaacttcatccgtgtcaatgcacaggagagatactacagcaaacttgcaggcgttacagagcctgagcagaaacgtaagatcatcggagaggaatttatccgtgtattcgaagaagaagcaaagaaaatcggggctgttgatttccttgcacagggaaccatctatccggacgtagtggaaagtggacttggcggtgaatctgcagtgatcaaatcccaccacaacgtaggaggacttcctgatttcgttgatttcaaagaaatcattgaaccgctccgcaatctgttcaaagacgaagtacgcaaagcaggtcttgaacttggtattccggaaaaccttgttttccgtcagccattcccaggaccaggacttggaatccgtatcattggtgaagtaaatgcagagaaagtccgcatcgtgcaggacgctgattatatttaccgtgatgaagtggacaaggctgttgccgcatacaaaaaagagcatggcaaaaacccatcttggatgccgaaccagtattttgcagcccttaccaacatgcgttctgttggtgttatgggtgacgagcgaacctacgattacgcagttgcactgcgtgccgtaaacaccgtagacttcatgact

SEQ ID NO: 14317 - DNA, 885 bp, Unknown
  gut microbiota DNA sequence
aaggtttccagggcgctattaagagatttggacagcacagaggtcctatggctcacggttctaaattccatcgtcatcagggttccaacggtgcatgttcttcaccaagccgtgtattcaaaggaaaaggaatgcctggacatatgggtagcgtaaaagttacaactcagaatcttgaagttgtaagagttgacgctgagaacaacctgctcttagttaaaggtgctgtaccaggagctaagaaatgtttagtaacaatcaaagaaactgttaaagcaggtaaatagtgcttagataggaaaggaggaacttaacgatggctaacgtagctgtttataatatggaaggcaaagaagtaggaagcctggaattaaacgacgctatcttcggagtagaagttaacgaacatttagtacacatggcagtacttcagcagctggcaaacaaccgccagggaacacagaaagcaaaaactcgttccgaagtaagcggtggtggtagaaaaccatggagacagaaaggaacaggtcatgcaagacagggttctacaagagctccacagtggacacatggtggcgtagtattcgctccagtaccaagagattactctttcaaacttaacaagaaagagaagagagcagctcttaaatctgcattaacatcaagagtaaacgagagcaaatttgttgttgttgacgagttaaaacttgatgagatcaaaacaaagaaatttgttgaagttatgaacaacttaaaagttgagaaagcattagttgtattaaacgacaacgatgtaaacgtgatcaaatctgcaagcaaccttgcaacagttaagactgctcagacaaacgagatcaacgtatatgatatcttaaaatatgatac

SEQ ID NO: 14318 - DNA, 1364 bp, Unknown
  gut microbiota DNA sequence
ctttatattcattttaaaaggtgtccgcacacataaaaaggtgcaccgccagagtaaaactacttgaaatctgcataaattgtcctctttttccatcttacttcaaataatctgccagttcttcacaacgctccatggtaagctctgccatcttaagactgctgtccatctgtgccgaagatccatcgttttgatccaggatttcgttgcctgctgcttctttgtctgcaatccattttctctgctcagtgagaatctcattgaacttttcctcacttgtattgtattttacaagattccagatttcatttaagcaggaatcgctgatatcatacatctgcatagcgtagtcgtccattcgggactgtagagttgcttttttaagctcctcctctgctgcatcataggatgcttgataagtatttaatgtactctgcgcttcctcatatggtgtctgtctttcgtaggaataaattccataccccatttcttcatttacaataatcggaatcgtcaacgtatcctgcgttccttcctcgctatcgtcatttgcccaccgtacccagaaatatacatcttctgacagatctctcaccggtgcccccggaagatacactttaaaggtgtccgttccttccagaccataaacatctgtataaatatacttcactccatctgcaatttcttcttttcccggagtctcatcataggtaagattctccattttcatctggtaagtataatcattgattttggtcaggtcagtaaattttcctgaaaagccgcagagatacatcgttccattctcatagtcatccccggtgtctcccatatcagaatcatggtaagatcccttgaaagagccatctttttcaatttcaaaatcggtagaccatccacctgctccactgcaaaattcgaatgaatattttgcaagatccgcgaatatcagatcaccactttggttttcgcttgcattttctgcactgtcgctgctgccttccgtatcatcgcttccgtgattttcctctatgtcaccctgaatagtgtcagatgttccctgactgtcctgattctgattctgcgcttcctgatctgccgtattttttgacgcatccggtgtcttggaacctccacacgcagctaatgatgcaagcaacagtcctgttattgtaagtattatgaatttgtttttcattattccgtccctttttctatcgttttccgataacctgattatttacaatattttttctgctttgttcttaattaattctaaggtatcttaatattgaccttatagggaatcattttatcatttcattgttggaatagcaattgttacatctgttcgtttaggggtg

SEQ ID NO: 14319 - DNA, 5732 bp, Unknown
  gut microbiota DNA sequence
gacaaaatatgatgttcctgctcgcatagctcgcaaaggaaatcatattttgtctgtacgatttctctttttctttatagcagtatcagaaataaacttgtggaagcctttaaaaatagtgtataataacaagacagagctttaaacaaaggaattaagatacatgattttaaagaagaaaattccaaatgatttttataaattattccgcacaaaaaacagggaagcatatatgcagtttgtcacagccatttacgaggaaaacaatgaagtatatgcttctctcggccttacacaggaagagtgtgcgcttattattgagaatacgatcgagaaatcaaagatcgtgtggcaggaagaggacgatatggaggaaggagaaacgccggatgcattatttccgagcgattctccttccggcatgttaaaccacctgatccggtggggatggatgaaaagcgattttgatgagaaactgaatacctgtgtgatctcttttccagaatacagccagttgtatgtcgagttgtttaaaaagctgcagagtgatgatgacagccgggaaagagagagcatgctttccatttacagtgctttgtttacctatcattccgacaatgagaaaaacaatgatattttaaaaagcgcactgcgcacatccaaaagtctggggcagctgctgtccaacatgcaggatggaatgcgttcctattttgatgagctttcctcccagaaacattttatcgggatccagcaggtgcttgtggaggagatcaacaacagcgacagcaaaaaatatgcaatcctcacgacgacggacagtttttaccggtacaaggaggcagtgaaagaacttatcagtgaaattttaaacgaaaatgatgagaaaaaagcagtgcttctgaaagaaaaaaattctctcgaagcaggcacgcttttacagaagagaaatgagtacagattgcagtattgtgaggatacgagcaggatcgtgatgcagttggagcgggaatttgacatgatcgagcgcaagtacaataaactcattgaacagaaaaccgtttttgcaaagcgtgcgctggcccgcatccattacattttgcaggagggcgtcagtgaggaagataacattatcaaactgatcaatctgttagaccgcagtgagaaaaaagacgagattttgatggaaatgagagatcgtatccgtttttcttcgcagttcaaaaatattacagataacagttttgccggaaggagagaccgtggggatggagcgtttacaccggtgatgctggacgaagaaatcgacgcaaaggaacagcacatgacggattttgtaccaaagccgttgtatacaagaaatgagttacagagtttcagaaggaaaaataccgtggatggaatctttgtggcaacagaagagaccgtacagtccgtggaagatctggaaaaacttctttttctctggcaggaagagacggaggaacgtctggcggaagatacggtatcggtggatggcgagatacggagtgaggacggactaacttattcgagacttgtgatcgggcagaatcaataaaattgagttatgatacaggaaagaaggcattggaaaaaatgttacaatatatggaaactgtctcacagggcgaggcagagaatatcagaaaaacgatacaggatttattccggcagacctgcattttacaggtgaaatgtgacccggcaactctggtacagcacgacaatccgaggtatcaggtgtgtctgcgccacagagagtttatcgcagactatctgtctgttctggactgtgagcttgtgcatgatccgcaggaacacattttccggatcacggggaatggcgttatgacagagcgtatgagccttatgacaacgaagctggtcattctgttaaaaatgatttaccgtgacaaaatcatgggggaaggtctgcatgcaactactacaaatctggcagagatccgtgagtatggaaaaaatacaaaccttatcacaagacgtctcacaggacaggagtggaacgatgcacttgttttgatgaaaacgcatcagatgatcgaactgccgggtgccgttgccaatctggaagattttaccccgatttatatttacagtaccgtaaacgtgttctgctctgcgatggatatcaacgagctggtgcgcacctatcaggacgaggtggaagaacttctgacagaagaggaaaaagagaattagatcattgacaaaaggagcagtacatttgagccaggcaaagaaagttttcacccgtatgtgtctgaacaactggggtggaattaatcataaagtattagaatttaatgaatatgtgaatttattcagtggaaaaagcggatctggaaaatcgaccgtcatggatgcgattcaggttattttatatggaagcttcagtccgagctttttgaacaaagcggcggatgatgccaaaaaccgcagaagtgtcttaagctacctccgtggtgagcagaaagatggttctgcaaaccgtggaaactgcgatttctgttcggtcattgcattggaaatcgaggacacgggaacgcacatcaccacctgtgtgggcattgcgtttgaagtgagaagaaatgattctgagatcaaaaagttttcctatttcagccattccggaaagatgccggaaccggggtatatcacggaggagggcttctgttattccaatcaggatatcaaaaagctggtaaatgagagagccgtatcgaaggataaccgtggaaaaggggatgtcaaccgtatttacgcttccaaggaagcttatcttggaacgttatatgatgtcattttaggttacattgatccaaaccgttttatcacgatggaaaagagtgcgatcgcactgaaaatgacaaacggaacaggacagtttatccgtgattatatgtttccgaagagcacgtcagacacgatcggaacgatcagtgagcagttagatgcctaccgccagatcaaggaaaaaattgaggatatgcggaaacgtatcgaacttttgacagacgtaaaagagaccgggcaggagctggtgacgctccagaccgatatgatccgcacagagagttttatccgctgcattgatattgaggatctccgggcaaaaatagaggcagccgaggaggacaaaaaaagaattgaagaagaacaggcacagctgcagcagcaggcagacacgctcgccggagagcgcggagaggtcgagcaggagctgatccgtgtgagtgcagatttaaaagccagcgatcttggaagcaaacagcagcagttagaggaattagagcagagaagccggatgctgatcgataacagcagacagtggcgcaaaatcgttcagggattgaaacagtgggaagaggatgaagttatcaccgattatatcagcaatccggttctaaatctcattgaaacaatcgaaaacggaaatgtgacagaggaaaattgtcaggacctgcatttgaaaatagagtctgcaaaacaggatatcgaaaatgaatttgaagattacagcgagcagaagcgcgaggcaggaaaagaactgaaagaaaagcagaagcttgtggatgatatgaaaaacaaccggaaatcctacagtgagaatctccgttctgcgagaagttccctggagcggaaattaagcgaccgctacggaagaacgataaaagtccagattctggcggatctttttgatgtggcagacgaggagtggaaaaatgcggtcgaaggccgtatgggaaggctgaagttttccctgatcacagagccaaagtttgcgcatgatgcggcggcggtctttcgtgagatgaaacagtttgaggaagtggatctcattaattccaaagcgatcgcagacagcgagccgcgtgccatggagaactctctttatgaggcggttgagacgaaggaagcctatgtggatgtgtgcctgaaacgttacctcggtcatattatcaagtgccattccgtggaagagctagagcaggtgaaagacggcgtgacgccggattgctattcgtacagtaattttattttccggcatctgcggaaaaaggattataccacaaatgcctgcatcggagagaaagtgtcaaaagcacgtctggcagagtacgaggctgacgtggagcggcttgagaaacagtatcaggaactgcattacatgaccgaacgtttaaaggcggcaagggattttgaaagcctgaaagaggaaaaagaatattatgtaaacctttccggcgcggaaaaagagcttggaaaagtcaacaagaaaaagactgcgcttgaggagacaatccgcactttgaaagaggggcagtataaggaattacagcaaaaagagcagagtttaaaacagcagatgcgtgagcttcaggcttcgatcggcgaaaatcagggactgatgagtgagaaaatacgccgccacgaaaatctttccggcgcaaatgaccagcgtcgtctgcagttagaggagatgctgcagggatacgtgccaaatgaggaaatcgagcaggaagtgcaggagcagttgaagaagcgctccggccagtccttgaagaatcagaaaaacgcagaacttgcagccctttcggcaggagagcaggagaaagccgagacactgcgcaccgccagaaaccgttacatttttgcttatccgtccagccagtttaacggttcagaaaagtctaatgaagcctatgagaagcttctggaagaatatcagacggactacgagccggcgtatgaagcggaatttgagaaacagtgtgattttatctataagagtctgcgggagaatgtgatcgcaaccatccatggagatatcaaggcggcaaaacgccacgcatacgagatcaaccgtttgctgcgtgagacgaacttctccgacagcacctatcagatcaagatcgagccggcaaagaatgagaatggccagttctttgagatgttaatggcagaggaattagacagtaaaaatctggataatgccggttttgatggtcagttgagctttggggaggacacgttctatcagaaatatgagcagaagatcaaactcctcaccgataaattcatgccgccgagagacgaggacgagcaggtgcgtgcgaagaagcgtcaggagatggagcaatacgcggactaccgcaattatctctccttcagcatgtttgaacaggtgacagacgagcaggggaatgtcattcgtgaaaattttgtcgatgatatggcaggaagagattccggtggagagggacagaacccgaaatatgtggcacttttggcaggttttgcaatgctgtatatgcagcagagcaaccgggattccaagatcaagcttgtgcttttggacgaggcattttctaagatggatcaggagcggagtgccgtctgcctgaaatatgcaagaaaaatggatcttcagctcattgtctgtgtgccggatgaacgtctgcagtcgctgatccgcaatgtggactgtgtctacggattcaggcgtcatcagaaccagatctccatgatgcatattgataagggagattatttaaaactcatggaaggtgagcatggacagggagagccggaaactgtaaaatagtgtaagaaaaccatagtcagggaggagacagcatgcagacaggaaaaggaattttaataccatctatattaaaagttggaaacgg

SEQ ID NO: 14320 - DNA, 904 bp, Unknown
  gut microbiota DNA sequence
cctggggataacaggcttatcactcccaagagttcacatcgacggagtggtttggcacctcgatgtcggctcatcgcatcctggggctgtagcaggtcccaagggttgggctgttcgcccattaaagcggtacgcgagctgggttcagaacgtcgtgagacagttcggtccctatccggcgcgggcggaggatatttgagaggagctgtccttagtacgagaggaccgggatggacggaccactggtgtatctgctgtcgaccaacggcatggcagagtagccaagtccggaagggataaacgctgaaggcatctaagcgtgaagcccccctcaagatgagatatccctcacataagtgagtaagatcccttgaagactacaaggtagatagggcagaggtggaagtgtggcaacacatggagctgactgttactaatcgatcgagggcttgaccaaaagactcggaatctgtatgaagttttgaatgtacaaaaaataacttacaaagtattgcaattttaacagttatgatatatagtaattaagtgacgtaccaatctacgtcattttctgtactacggagttgttagtaactatatattcctcgatagctcaatggtagagcgcacggctgttaaccgtgatgttgtaggttcgagccctactcggggagctcaatgaataattcggctccgtggtcaagcggttaagacatcgccctttcacggcggtaacacgggttcgattcccgtcggagtcactagcaggaattttatattaaaatatatggcgacatagccaagcggtaaggcgtgggtctgcaacaccctgatcaccagttcgaatctggttgtcgcctcttaagaatccatagtaatatgggttcttttttttgatcaaaat

SEQ ID NO: 14321 - DNA, 22378 bp, Unknown
  gut microbiota DNA sequence
tgttacattctaaggtataatacctttgatggcctaatggctcagttggttagagcgccgccctgtcacggcggaggtcgcgggttcgagtcccgcttgggtcgcttaatggaagtttagctcagctgggagagcatctgccttacaagcagagggtcacaggttcgagccctgtaacttccatttcttatgccgatgtggctcatttctcgacaattgacgaggaacgagtcaattgtaggcagagcagctgattacaaatcagctgataatatatgccgatgtggctcaattggcagagcagctgatttgtaatcagcaggttatcggttcgagtccgatcatcggctttcataattcattcagttggattgtgagacaaatcaatttcatattgttttgtgataaatgggcagattcccgagtggccaaaggggacagactgtaaatctgctgcaacttgcttcggtggttcgaatccacctctgcccattcttctttttagaagacaatatttatcgcgggatggagcagtctggaagctcgtcgggctcataacccgaaggtcataggttcaaatcctattcccgcaactcaatgcttaggcattatgcccagttagctcagttggtagagcaaaggactgaaaatccttgtgtctctggttcgattccggaactgggcattgaaaacaatataatacggggtattagctcagttggtagagcacttgacttttaatcaagttgtccggggttcgaatccccgatgcctcatgactgtaagatagcggagaaaccagtaactttatggtttaccgctatttttgtgtgaaaaaagcaggaatggtaattgaatctaaacaatatttaattgtcacaatacggatttatttacgtataattatactaaaattatgcaaaatattatgcagaatatacaaaaaaatgtagataagcaaaataccttgtagtataataggatacaacacgaaaaaatacactttaaccagaaaagaggaagttttatgagtgaagaacaatattccagagcaaataaaagagtactgcttgcaatagtagttgtttttggatacatagtagccacctttatgttagcattgggcgtcagtcagggcgaacacgcagcaaagattatgattgaggcagtcacggcagcagcagttattgttatctcggttgtggcatatcttggtaaaagaacaacacgcacatgtgcggtgatcatgacactgtcaatgatgataggttatttcgtaattgtccaattgaacacaaccgttggaacatggacatatggtctgccgctgctgatcgttgcaatggtttatctggacaagaaaattgtgatgatgacaaatggtattgcactggctaccattatagttcatttagtcagatgctttctgggtgacggatcagatctgcagaataatgtgattgggctgtttgtattattactgaccgcatatgcctgtaatagtgcagagcgtctgctcgagcgtttctttaaagaaaatcttgcagaaattcaaaatgcatcggatatccagaaggatagtaacaaaaagatgatcattgttgcagagaatatttccaagcattttggagaggcaatggatatgcttgacggtctgcaggaatccattaatgtgagtcacagttccattcaggaaattgcagacagcacagaaagcacggcggaagcaatccagaaacaggcggttatgtgttctgatattcagggaaataccgatcaggcagagcagggcatcaaagaaatgatcgaggcatcacataagacgaatgacaatgtgaaagaaggtgccggtgttgtcagcgaactgaaggaacaggccgtgaacgttgcagatgcgagtcaggtgacggtggatgtgatcagaagcctgacggataaagtggaggaagtaaaaacatttgtcgactccatcatcaacatttcaaatcagaccaacctgcttgccctaaatgcctctattgaagcagcaagagccggtgaagccggaaaaggtttcgcagtcgtggcagatgaaatccgtcagctttcagagcagacgaaggatgcttctgcaaatattacagagatcatccagaaattgaatgaagatacaaaacgtgcgaatgacagcatcatgacagcggcagaatctgtagagaagcagaatcaactgattgatgataccagagataaatttaatgatgttggtaatgcagtggaagttttaatgggaaatatcgatgttgcagaacagagtattcagaaaatactggatgcgacaggagtgatctcagataacatcacgcatctgtctgcaacaggtgaggaggtagcagcttcttccactgagggtctccgcacggcagacattacagtggagaagatgtccaattgtagaaaagtgctggaaaatatttatttactggcagaggatttgaaaaattcagtagaaaataacgaaaatcagtaatgaacaggacaacggagaaatatttaaaatagtatgggagaagcattacaaaaatagcatatcgaggatgcattttaaaattatcacttgacggattcctgtgaaactattatgataaaaaagaatacttcaatgcgttgaagtacgaaaataaaactgcataagatgtagatagcacagagtatatcatagatacacgcaaagagaagtttttatgcaggcttggagttacacatggaggatgtaccaatggaaatggagatggaatttttacggaaactgccaacaccacaggagttgaaagagcagtttccggtaagcacagaagttgtggcagcgaaagcccagagagatgaagagatacgcaatatttttgagggaaaagatgacaggctgattttagtgatcggtccctgctccgcagataatgaagatgctgtcattgactatatatccagattgagaactgttcaggaaaaagtgaaagataaaatttttgtaattccccgtatttatacaaacaaaccgagaacaatcggcgttggatataaaggaatgctgcatcagccggatccggagaaaaaagaggatatgttaaaaggaatcattgcaatccgggagctgcatacgagagcggtaaaagaaaccggatttacctgtgcagatgaaatgctctacccggagaaccacagatatttgtccgatctgttgtcttatgtggcagtaggtgcacgttccgtggaagaccagcagcatcgtctgaccgcaagtggagttggtattccggtcggaatgaagaatccgacaggtggggatattgctgttatgatgaattccatgattgctgcacagcatggacatacgtttttataccggggctgggaagtgacaacaaccggaaatccatatgcgcacgctattttgcgtggatacgtagataagtttggacgtaatatcccaaattatcattatgaggatctgcagaatttattagaacattatgaggatgtcaataaagcacaacagacaactctcgcaaatccggcggtcattgtggataccaatcattccaattcaggaaaacagtttatggaacagattcgtatcagcaaagatgtattacatagctgtaaagtgtcaaaagacattcataatctggtaaaagggcttatgatcgagagttatattgaggacggtgcccagaaagtcagcgaacactgctatggaaaatccatcactgatccttgccttggatgggagaaaacagaaaagctgatttacgagttagcagatttatggtaaacttgcttaaaaaatcgttgcaaacgagctttgtagcgattttttttgtgcattattccggaaaatgcttatttttccgaaaaaaataagaaattcggcttcacatcagaatcgatttgtagtggaacgcaatacattttttggaatatgtagttcttaaccgaattttagctagaaaaaagttgaaaattctagaaaatctgataatattgacatgggtttgaatttgaatatgtaaaaaagaagaggtgcaaaacatgaacagtttattactttgcattccgtttgcaggtttattgctctgcattgcggtaatgccattggtaaagcctgagtggtgggaaaaacatcaggctttggcagtgatcgtgtggtcattgctttttattatcccgtctatcgtgttaaacggcgcaggagagacgaccgaaacagtgttagagtgtatcgtgaatgattatctgacctttatcgttttattattcggtctgttctgtgtatccggaaatattacgctggagggtaaccttgcaggttctcctgctgtgaatgctttatttttagcattcggaactttattatcgagctgtatcggtacaaccggtgcaagtatgctgcttgttcgtccaatgatcaagatgaattcatggagaaagaacaaagcacagatcatgatcttctttattttcatgatttctaatatgggtggatgtcttacaccaatcggagacccgccacttttaatgggattcatgcgtggcgttccatttttctggagcttacatctgttcccaattttgattttcaatatgattttattattgatcattttctactttaccgataagaaacagtatcgtaaagatattgcgaatggcttacgcccggatatcagcaaacctggtgtagaattaaaagtagaaggtttgcataatgttgttttccttgtagcaatcgttgtagcagttattttaagtggtactcttccaagtctgccaatgttccaggatgcagccggaaatgtacttggaattacaatttacaaatctgtaaaattaacattcccagcaattattgaggttgcaattattcttttagctgcattattgtcctttaagacaacaaacgaaaagatccgtacccagaaccactttacatggggcgcgatcaaggaagttgccgtattatttattggtattttcatcacaatgcagccagcgcttgcattacttaaaacaatgggaccaaaccttggaattaccgagccataccagatgttctgggcaacaggacttctttccagctttttggataacacaccaacctatctggtattcctcacaaccgcaggaacactcggatttacatccggtattcttaccacagttggaactatctctgtgaagattcttacagcgatttcctgtggtgcggtattcatgggtgcaaacacttacattggaaatgcgccaaactttatggtaaaatcaatttctgatgaaaacggtatccgtatgccatccttcttcggatatatgggatggtcactgtgtattttagtaccagtattctttattgatatgctggtattcttcctataaattgcagtgctagaaaggtatgatgaatcatggaaaaaaatagagagaattgttacgagatcgcaaaacagatctatcagttagataaagacgtatacgagtgtgtaggttcttctctgggtagaacttttaccggagatgaggcaacctgcgttgaagagatcaccagacttctgatcacaagaccacaggggcatgagatccgaagcgatattgcattgatcggcaatatggcgagaaccattaagaataaagaagatcatcacagaatgatgtcccagtacaacgagattttgaaaaaaatcgctcagattccaacaagtttcggaagcgttgatattatcaatgaaaatatggctgcgctgaatacttccaatttaagacagaagttttcaccggacgatcatctgatcatctgtatcggtcgtacacacggaagtgccggaacggatatcggatttgcattggcagataagttgaaaatcaattactatgatgctgagatttttgatcaggtattaaagagaatggatgctgagaaagaggatattgaagaccacagcaattatgtagaagaactcaaaggaaagattgagaaaaatacaggtgttggaaagttcttcaagaactttaagaaatatcatggacttccggttcaggatgctattttcttcaatcagagtgatctgatctgtgagatggctaagaaggaagacttcattgttatgggtagatgtgcagatgtggtacttacgaatcatcgaatcccacatatcagtatttttattacagcttcttttgaacagcgcgtgcgccgtatgatggagctgcacaatttaaattacaagcaggcagcgcaccttctggtaaaattagatgcaaggcatgcaaaatattattttgattataccggtagaaagtggggagatgctgttaactatgatttatgcatcaacagtgcaagctacggtattgaagagtcagtagaattgatcgagcgtatgatcaataaatatccgaacagctaaataaatgtgatggcagaaaataaacaggcatgagggataaaaattccgcaatatatcaaaacaaaattgatatattgcggaattttgactataatattgcaaagtataaatgagttagctgtaaaatgacaggagacaattttatgagatatccaaaatttttaccggaaaacggaaccattggctttgtcgcaccgtcttttgggtgtgcaacagaaccatactatacagcgtttttgaatgcacagaaaaaatttcagaaaatgggttatgggcttgacttaggcccgaactgctatgtggcaaaaggaatcggcatcagtaatacaccacaggcttgtggaaaagagctgacggattactattgtagtgtggataacgacattctcatttcctgcggtggtggggaaatgatgtgcgagacaatgaactttgttgattttgagaaaattaagtccgcagagccgaaatggtatatgggttattcggacaatacgaattttacgtttttactcagcacaatctgtgatacggcagcagtgtatggaccgtgcgcaggaacttttggcatggagccgtggcatgagagcctttcagatacaatggatgttctgacaggtaaaacaaagaaattgcacagttatccttcatgggaaaaagacgatctgaaagatgagggaaatccttatgttccttacaatgtgacagagccatccagacatgtgatctatccgggaaaagagatagcgcaggcaatgcagccggagatggtttggaaagagggcgagacagaactatatatcggaaatgagaacccggatgtgtcattaaaaatggaaggacgacttgtgggcggctgcgtggactgcctcgtaaatttactgggaacacagtttgattatgtaaaccaattcaatgagaaatacaaagaagacggaatcatctggttcttagaatgctgcgatctgaatgtgatgggaatccggcgtgccatgtggcagatgaaaaatgcgggatggtttcagcatgtgaaaggtttcctgatcggacgtccgtgctgtatcggggaagagatgatgggactcgatcactatcatgcagtgaccgacattttaaaagatttcgaagtgccgatcattatggatatggatattggacacagaccaccaatgatgccgcttgtctgcggaagcatggcagaggtccgcgtgaaaggcaatgatgttacaatcgatatgaagtatatatagggaagaaaagactggaacacgaagaggatgatagttcatcatgcttcgtgcaccagtctttttcctataaagtcagatcgatattgctgccaagtgtttcgcttagcacaacactgtcagctttttctgccattttcttggaataacggcttacctttgtgatatattctgcatcatcagcaaataatgttttgactttggaaactttggctgattttagcaggttgtcattggcacttaagcttccatcggaattaacggtgatcccaatcttggacaattcactcgaatgctccttggaaagtgacttcagatatctggagtaacggttcaaagaagcgtcatctgttttatttccggatgacagcgtgttattgtaaacttgtataaatgcgttgacgcttccgtaaatattggcactgtctgtagtgtcatcctcataattaaaattgcgtaacttcttcgctgcacggtggagtgctgtggcatccgcctgtgaaagagtaccgcctgtcatctctttgcgcttggatgaagtgactgcattacggtttgctgtataaaaatttctaagataataactggcactcagagatgtgccggttcctgcaactgctgccataattccctccgtggaatggtatcgtttctgctcactactgaattactttcttacgcagcaaaacagcaagtgttttactgctataatatttatcggtaataagataaaattaattagtataattccggcaaatcgtttataatgtgtattagcaatgagcagtgctcaaatcggaagaaataaaatttgactacttgtagtcagaattttgtttcttttgatttgaatagggcgaatgcccgtcagccatgaagcgcgaagcgattcatggcgtgcactgcggacaacaacataaaaatgcgtgcaatagggcgaatgcccgtcagccatgaagtgcaaagcggttcatggcgtgcactgcgagtaaaaacgtaaaaaaaggagaacaattatggaagcagcaattatttggatcgcattgattattatatttgcagtggtggagattatcacggtaggccttacctccatctggtttgcaggcggagcactggtggcattgcttgtagacgcagccgggcttggaccggtatggcagtttgcagcatttgtggtcgtgtcggtgatcctgcttgtatttacaagaccatgggcattaaaatatatgaagccgcgtcttgtgaaaacaaattatgaggcagcagtagataagaacgtatgcctgacagaggcggtagataatattaagggaaccggaaccgccgtgttaaatggacaggaatggactgcgcgcgcctacgaagatggaaaaacttttgaggccggcatgatcgtgaaggtaaaagaaatccgcggcgtgacgctttatgtgacagagagcgatgcaatgccgaaaaaagcagaggaagcagaagcaccaaaggaatcagaacagtaaacaaaaatcagtcaacatggtatgacagagagatagaaagaagtgaaaaaaatgaaattaggaatggtatttgaaggcggtgcgagccggacagctttttcctgcggtgtgatggacgcatttctggaagaggaactgatgccggattactttatcggtgtctcggcaggaatcgcatttggtgtgtcgtatctgtcaaaacagaagggacgtaacctgaaacttttagaagaatatatggcagataagcggtacatgggattgaaatatctgtttgaccgcaaaaagaagagttattataacatcggattcgtctttgacgaagtcccgaataagctgctgccgtttgactacgaaacttttgcaggatacaagggtgtcgtggaggcgtgtgtgaccaatatccataccggaaaagcagagtatctgaaagtgccacagagcgtggaaatgaaagatacgctggtggcaagctgttcccttccaattttatttcagccggtcaaaatcggaaggcattattatctggatggaggaatcgcagattctatcccattccggcatgctttggaggagggctgcaacaaactgatcgttgtgctgaccagagagcatggttatgtgaaaacgactgagaaagcgatccggatcacggacaaactttacaaaaagtatccaaaaatcgtggaagccatggatacaagggctgagcgttacaatgaggatgtaaaaaaactggatgagcttgagcggcagggaaaagtttttgtgatcgcaccggagacaacgctcggtgttggacgtacagagtctgatccaaaaaaactgcgggaactctatgaagaaggccgccgcatcggtcaggatagaatgaaagacctgagagaatatctggagtgccaggatttataaaaacagacagttgtgaaacttgtaaaagcttaaattaaattgtgagaaattcacaaaaggagtaaacaaaaagatgaaaatcgtttttttagatgcaaaatccattggagatgacattgacctttcgggttttgatcagctgggagaagtagtaaagtatggattctccacaccagaggaagcaggggagcgcacgaaggacgcagatgttgtcattatcaataaagtacagatcaacgagcagacgatcggcagggcagatcacctgaaactggtctgcgtgactgctaccggtaccaataatctggacaaggaatatctggcaaagagacagatcgaatggcgcaatgtcgcaggctattctacagagaccgttgcacagcatacatttgcgttattgttttatctgttggaaaaattgaactattacgatcaatatgtaaaatcagaaaaatatatcggagatacgattttcacacatttctcgaacgtattccatgacttaaacggcatgacatggggaattgtcggacttggaaatatcggcagacgtgttgcagatatcgcaaaaatgtttggatgtcatgtcatttactattcaacttccggtaaaaacaatcaggagggttacgagagagttgattttgacacattgctgacaacctcggacattgtatctgtgcatgcaccactggatgccaacacacagaatctgatgaatgccaaagcctttgcaaaaatgaaaaaatctgctattttcttaaacctcggacgcggaccaatcgtggtggagcaggatctggcagacgcattgaaaaacaatgagatcgcagcggcaggtctggatgtactctgcgttgagccgatgagtgcagacaatccgctccgtgagatcaaggacagcaataagctgattatcacacctcatatcgcatgggcgagtgtggaggcaagaacaagattgatgaatatcattctcggtcaggtaaaagaatatttcaaatagtgcagtctaaaccactgtgaaaagaggcgtttccatagtctttcaaaaactgttcggtcagaagcgctgctttcggcgaatgtatccgttcctttaacaatgcagataattcagtgagacaatggagatatttttcttcggtccgcccatagagatcgaagaaagattccacggatgtgatggacggatcccacgggttcgtccattttttgtgctgcatgttaaaaggatcagtgcggaataacagcgagtcgttggcaatcaacggtgaaaataccgggtagccaagtgtatgcttttctgcaaaacggaacagcacttttttctgtccggtgccatcgtataaaatccggaaaccaagctgcgttgcgaaaatcgccataaaaatcgtatagcggctcacaaacagaccgtggtaagtgtgctggtaagcgtagtggagcatacgcgcaacgatccatttctgacgaggtgtcaacatgatcgtattttccatatggaagtcagcacgccgtctgtggtacttcagctcaagcagagaggtgtcgatctcggtctctaaataagcgtggcgggaaaaataacctctgtcattttttttataatgggtgcgtccataaataaatggatggcagatggagtctaatatataatgtcccaaaaatccttccagataagcatttgcgatctgcagatcttccggcttcttaaagatactgcggctctctaaaagtgcggcataaaaagcgccggtattttcggtgtgcgccatgtcgcccagattgtgtccgtgcagtacgtaagccggcagataatagaaaaaaatgtcaggtccctgatgccctaaggcataaaccgccctgtttttatataaattgtttttcaaaaccggatcgtttaatttctcatacatatcacgaccaaaaatataatgtgtcacatagccgggcataaagtcatctcctaagtaaaagtatttcattttcagtacatttttattatacccataaaatcaggagctgttaagcagagaagtcattattaagaaaaatataataactgtgcaaaaagattgataaaaatatgacaatgtttataataaaagtaatatgcgaaagaggagaaggaaatgaatttaaatacaataggggaaattttacgattttatcgagaaaaatataactttaaacagagtgatgtttgtaatggaatatgttcatttatggaggaaacatgaaaaaacaaaagacatttttaaaaaataaacaattattaggattttatctggtggtgggagttcttttttctgttatcagtgttgttgcaccatctatatccggagaactggtaaatgcggttatttaccgtcagggagatgtgaaagtatatttgtttttacttgttttaacatatatacttttactactgttttccattgcggatcagtatttttttcagtatttccaaattaaggaaaagaatgcaatgcgaaacgaactgtttcaggcatccctaaagagaggaaatcaggaaaaagagcaaattgcagcatttacatcgtttgtgaataatgatgtgccgaatattgtagagaattattatggtggtacggttgatattataaaatgtgtctgtatcatcatttgtgttgcattagaactttttcagattcattggcttttggcggtaattatttttggaagcagcatattgattattatgattccgaatatcatgcgtggatatgcgtcgaaaaatcgaaaaaattacggagaagcgctcgaaaaatttaatgcagtgcaacaatcgctgttaagcggagcagaaactgtaaaggtgtgtttgtatagaagcaatgccaaaagaatgatagaaaataagaacaatgagattgaaaaagaggaaaaacgtttgcgaaactgtcaggtaagtgtttatgggcttgccggaggtatgcagatattgaaaagatttttaattcttgcggtaggcgtgtatctaatttatagaaatatcataaaggtagggggacttttggtagcagtccagttggcagaagtactggctgcaccggcagaaacacttgcctatctgttaaatgcaaaaaatgaagcaagaccacttgtagaaaaatatgaacagcttgcagaaacagaagaagaccggggaaaaacagatatcaacgatatagaagatatttgtgtggaacacttatcctacgggcgaaacggggtaaaaataatcaaagatgtttctttcacctttgaaaagggcagaaaatatatgttgactggatcaagcggaagtggaaaatcaacgtttttgagattaataggaaaactgcaggaaggtacatatcagggaaatatccgcatcaacggcattttactggaagagataaatatggattctttatatggaaagatgggaatcgtatttcaggagccgtatttatttggattttcactaaaagaaaatattattatggggcgcaatgtaaaagacagcgattacgaagcaattttgaaaaaattaaatctgggctatttgttggaacgcttctcagatgtggaacttgacacagaaatggtagcaaaattatcgggaggtgaaaagcagcggattgcattggcaagagcgatggttggaaagccgcaagtgtatctgttagatgagattacttcctctttagatgagcagaatgcccgagagatggaagaaatactgttagccgaagatgctatggttctttatgtgtgtcacaaaatcataccagaattgaaagaacagtatgaaatgctgacattttaggaaagtaaaggaagccagaaaagaataatccgtaatcatgttgactttgaaaaaaataatgctataatgcatatagtattaaaaactacatatcataatatcgatattcaatatagtggtttctgtatatagatgatagacaaaaatgaagaaatgtatattgacatgcgacaaagaaatttttttgcatatttaaaaaaaacatgaaatttcatatactttccactagtaagagagaatatagttgtgagagcctaaatatctatacaaaagagacagataggttgattggtatggaaaacggaggattaagagatggcaaatttagtagagacagtggaaagaaaagcatttggtgtcgcagtcgacgcaacattgaagaatctgaataaagaccgtgaaaaagcattattacagatcgttgatctggcagaaaagttcatgggaaacaacttcagcaaagaagcgtatgatggtgcaagagcgatgatcaaaaatccggatcataaatggatgagatatgtgaatcgtcttctggacgaaacagatccacacgttgctaaaatgacagcattaaaccttggttttcaggctgcatttttaggaacaaagacaatccgtaaaatgagggaagtacacaactgtaacattccgtggctgatcttaatggatcctacttctgcatgtaatctgcattgcaccggatgctgggcagcagagtatggtaataagttaaacctgacatttgatgaaatggacagcattgtcacacagggtaaagagcttggtatttacttctatatgatgactggtggcgaaccactggtacgtaaggcagatattatcaagttatgtgagaaacacaatgaatgtgcattccactgctatacaaatggaacgctggtagatcaggcattctgtgacgagatgaaacgtgtcggaaacctttccttatctatttctctggaaggctttgaggatgcaaacgatttccgtagaggagccggtgtatatgataaagtgcttcacgcaatggatctgctccatgaaaatggattgatttttggtaacagcgtatgctatactcgtaaaaacatggatgcagttacttctgatgagttctttgatcttctgatcgagcatggaagccgttttgcatggtatttccaccttatgccagttggtatgaaggcagctccggaactgatgcctacagcagagcagcgtgaatacatttaccacagaatccgtgaggttcgtgcaaaagaaggtggaaaagagatcttcgttatggacttccagaatgatggtgagtttgtcggtggatgtatcgcaggcggcagaaactactgccacatcaatccaaagggagatgtggagccttgcgtattcattcactactccggtgccaatattcgtgagaaatcattgctggaatgtctgaaacagccattattcatggcatacagggatggtcagccattcaatgacaatatgttaagaccatgtccaatgcttgagaatccggaattattacagaagatggtacatgaaaccggagcacattctaccgatgtggaagaggctgagccggtagaacatttatgtggaaaatgtgaggcatatgcatgcgagtggaagaagactgcggataaactgtgggaagagcatccttatcatcagaaaggatacaccaatttcaagaagaaataagaggcgagaacaattaataaaaagcagaaaaatcttttgaaatggctatttgtaattttaattataggagcgatcgtatataccttccgggatacagcgggaccgatcttagagcagttaaaagaaacgacatcgtctgttctcacaggtatatgcgtgatgtcagggatatattgtcttgttgaagcactgatcacgactgtgctcgcaaaacagtataaccctgattttcgttatcaatggggaatagaaaacatgtttttctgttccttttatcgtgttgcgacattaggaagcggtgctggtgtcgcagcgatcatttatctgaatgaacacggtgttgattattcgaagggatttggaatgtacatgctccagtatgcattccataagatcagcatagcaatttattcggcgattttctttttcctaagctggaattatatgtgtgggcattttggagcttatacctggctgcttctggcggggtatgctattaccatggtgatcacactggcactgatcctgttctgctgttccacaaagttccatcagctgatttttgcaatgcttgatttctttaataaaaaaggaaagtttgatgtattggaacaccagttgagagaacagtgcgcagatctggaaactgcctctaaatatcttctgcataagaaaaaaatggtagccggcgtgatcggtttaaacctgttaaaactctgcttctggtatggaatgccatatcttttatttgcaggacagggaaatatcaatctggtggaaacaatggcgatcacggcattgtcggttatgttggcagcagtgattccggcaccggcgggcattggctccacggagtttgtgtttaccggactttttgcagggattgtcgggacaggcatggctggttctgcatcgttgttataccgttttgcaacatttgtttttccatttttgatcggtgtgatcgtggtgattgcacgaaaaatcagggagcgtcaggcgatggaaaatctttgatgacacagtctgcatagatgcaaaggttgatacctcataatgacttttttcataaaagtcattgtggggtatttttaaaaaaaaagaggtcttaagaaaagattaagcttcacaaaattgacaaatttttgtgggatgatagaatatcgttggtaaagtgtaaaaaacgggtaaaatcgaggtgagatgcacgggcggatgcagcgtgtgcaacaattacagggagcaggaagatgaagattcgtctgaaatttgaaaaaacaaatctgatacgtcttatcgtggcaatgatttttgcggcggtattatattataaagtaacatttccgatttatgtgctggcaggttttggagcctgctatttcctgatcaaaagtctggaaattgaaattaataataaatggttaaaactggcattgaacgtggtactgcttggcggcagcagtgtgctgacggcgtacatggtgcagtatcttctgctggatgtggaacttcgggcgaagattacggacgcgaagatgtttttgaatgtcctgtgctgtctggttgtctatgtggtcgtgcaggtgtttacaaaaaatgcgggattgacctgtattatttcacatatcacactgataagctttgccggaattgactatttcgtttatctgttccggggaaatgaatttattttcagcgatctgcgctctatttccaccggtttaagtgtggctggaaattatgagtttgtgctggatgacagagcagtttatgtggtactgctgtcggtactttatgtggcattcgtgcggaaaatccatgtgaaatttgaaaaaaagctctggatggcagtggtatgtatttccattgcggtattctgctgtgcttatattggaaccgagacagaaggcactgtgactgagacgtgggagcagaagggaagctaccgcaacggttatatcttgaattatgtgttgagtatccgtgactgctttattgcggagccggacggatattccgaggaagtggtgacagaacttgaaaaccagtatagcggcgatggagaaagttatgtaaaccaaaatatagagaagaaaccgacgatcattgtggtgatgagcgagtcgtatgcggatctgtctgtcgttggagatattctgacgaatgagcaggtgacaccgtattatgattccttaaaggataatatgatcaagggacatgccttgtcctctgtctttggtgcaaagacaccaaattccgagtgggagtttatgaccggcaattccatggcatttctgccgagtggttctgtcgtgtatcagcagtatatcagtgacacaccgacatccattgtctcaaatctgaaaaatatcggttatacctgtgtggcaatgcatccttactatgaaacgggatggagccgcaacgtggtttatccgaccatgggatttgatgaaacacattttattgatgattttgaccagacaaaactgttgcggaaatatattacggatcaggaattatatgagaatatcgtagcgcgttatgagagcaaaaaagcgaacgaagatctgtttatcatgagtatttccatgcagaaccatggtggctacacggaaaaatatccgaattttaacgagcagatccggacacttggagcaagttattccgatgcaaatcagtatctgtcgctgcttcgtgagagcgataaggcactcgaatatctgatcagttatttccagagtgtggaagatccggtggagattgtctttttcggggatcatcagccgagtttgaacactaatttttataagggattgaatggaaaaggactgtcgggattgacggaagatgaactggaaaatctttatacggttccatttttcatctggacgaattatgacacagaggaagaggaagttccgatcacaagcctgaattatctttcgaccatggcattggagcgtgcaggtatcgcactcccgtcgtataaccaatttctggcggatatgcagcagacaattcctgcaattaattcgaggggatattattctgtctccgagggctgctttaagcatctggaggatgccacaggagaagaggcggagtggatcaataaatatcagattttgcagtataataatatgtttgacaaaaagaagcagagtagtgttttctttccgtatctgcaaaattaatgtgttgcgaaactcaatttaggtaatgaagattatgaaaaaacagcaggtgcataagaaaacacgttttcactacgtgtcgctcgcaacggtactaagaactcatctcctgcatttcatttctgataaatcagaatgaaatacagaatctgacttctaaggaccggcggctccccagtgttttcttatgcacctgtcgttttttcataattaaatttacgttatatgggagtttcgctataaagtaatagatggtatacttgggaaagaaaagatagataggaaggtagaataaatggaaatggtaacacttggaaagaccgggatcacggtcaataagaatggattcggggcgctcccgatacagaggatcagcacagatgatgcggttgcgcttgccagaagggcatatgaagcgggcatgactttttttgatacggcaagattttatacagacagcgaggaaaaattaggcgaagcttttgacggaatgagagagaaggtctgcattgccacaaaaacagcagcacagaatgccgaagctttctggaaggatttagagacttctttgcacaatctgcggacagattatattgatatttaccagttccacaatccttcgttctgcccgaagccaggagatggcacaggattgtatgaagcgatgttagaggcaaaagcgcagggaaaaatacgccatatcggaattacgaaccacagactggcagtggcaaatgaggcaattgattccggtctgtatgagacgttgcagtttccattctgctatcttgcaaccgaaaaagatctggaacttgtgagaaaatgtaaggaagcggatatgggctttattgcaatgaaggcactttccggcggactgatcaataattctgccgcagcctatgcgtttgaggcacagtatgacaatgtgcttcctatctggggcgtgcagagaaaagcagagctggaagaatttatttcctatattgataacccaccggtgatgaatgatgagatcaaagcactgatcgagcatgacagaaaagaattaagcggagaattctgccgtggatgtggttattgcatgccatgtccggcagggattgagatcaacaactgtgcgagaatgtcgctgatgctgcgccgtgcaccatcggatgcacagcttacaccggaaatgcaggcgaaaatgaaaaagattgagaattgcctgcactgcaacaaatgtaagagcaaatgtccatatgggcttgatacaccagcattgttgcagaaaaattatgaggactataagcgcgtgcttgccggggaagtgagcgtgagataaaaatctccgtaatggtaaactatggcttcatttttaacataataatcgtgtgaaaagtgaaagtttcctcatcatagtacatctgcatatttccgttatagttatgaacaattttttctatgctcttaataccaaagccatgtgcctgtgggtcaggtttggaagaaacaagttccccatttggagaaaacggattgcaggcacaggagttaatcattgtaataatgataaatggtgtatgttctctttgggtggcagagatttcaatatagggatctttgatgcgttgtgacgcttccaccgcattatccagcaggttacagaatagggaagtaacatctgaatccgagaggaaagcagtggtattactgcggatatctgcgtgaaatgcaatatgcagatcattacacacttttttatagcggcacaaaatattatttaatattttgtgatcacatatcttagagaattccaataaatcagaggactgcattagttgattaatgtaagctctgattttttcattctggttatcttcatttaacagtgcaatggattgaagatgttttttcatatcatggattaaaatacgctgattttcattttgtgcaatgagcattttataatattctgcagaatcatgttctttttgtaactgcaattgcatttctgtaaattcaagatgttttttctggttatattgattcagaccgaaaatcaacagattaacgatcagaaggaaaaaagcactggtggtaatcagacggttttgggtggctgtcattgcggtagaatcacagaccgcaataagaatcaatacgattatttgtgcaatgaatggaattaaaatcgtaaagaaaacagatttatcatactgtaaaaaaggtttttggcgtttcttcaaccataacagaagtaccgacattacagcaaaaaagagagttttgctgataacggcaaaaagaagctttaaatgaaaattggaaataggatcattcgtagcggataaaaaagtagacaggaaactatataccggaagctcacaagctcctgtgattacttcaaataggagtgaatgaaaaagtgcataataccagttagtcttatagagaaatataagatagagaaaacaaactgtaatgtacaatatgcaattaagccagaaaagattacacaagctgaataaaaagaggataaaaaaacctaaggataaacaaatcaaacggatttttgcactgcattttggaacaaacaggatagatacataattccagaatacaattccctctatcaaaaaactaaaaaaataacatatcatttcatccatggatattacctcatactttccagataaagcagataagcatctttaaaagtgcggtatttacgccgcgtcaaataagcagtgagctgattcgttaagtgaatcagtgtgtggtcaaagtctgttatatgttcaaaattcacaataaaacttctatgcgtttgaaaaaaacgacttttgggaagtgtatccatccagtaggatatattgtgaaccgattcaaaattgttccgggtagtataaataattactttgcggtctgtaacttcaacagcaataatatcagaagcagagacggtatggatgccatttctggtttcaactggtatcagaaaggtggatgtatggtagaggttgaccgcatcctgcatattgcggaaaaagcgctgacgttccaaaggtttggaaagataacggaatacgtgaaagcgcatagcttcatctaaatattctgtgtaagatgtgacaataaaaataatcacagcagggttacttttctttaactcgtttcctacataaatgccattcatgcccggcatttcaatatctaaaaaaacaatatctttatttccagtgtcacttaataaatcctctccgcaggagtatgaaataatttcaggacattttgtgtgattgtatgtaaaaaaagattttaaatttttatggatttgttcgattgctaatggatcatcatcacatattaaaattcgcatttgggtattcctcgtattttttttacattataccgagaaatataatatttggcaaaagtaatgcgcgaaacgacaaaaaagagcagattttggttagtttgatgttgtataaataaagttgacaccttattctcaaggaattcatgtataataaaagagaataaggaggaactctcaatgtcacgaacc

SEQ ID NO: 14322 - DNA, 12713 bp, Unknown
  gut microbiota DNA sequence
gaattgctggaagtcagaacgatgacgggaatatctttaaatgcatccatcgtctgtctgcgtcgcagaacctcgaatccgtcaatccctggcattaccaggtcaagtaaaacgaggtcgatcagatggctgcttttctcaaggatcattaaacattcttcgcctgaagtggcttcttcaaggcgaaaatgttctcccagcatctcttttataattgcacgttgaaattttgagtcatcaacaattaaaagagtttctttcttttgtaagttcatactaatcccccataaggaatggactctaatacaaataagtctatcagcaatactatagcacatttggatttggatattcaataaagaaatcgcactgcaagattttttgacaaacatttttgaccgtggtataattcctccccgattaaggaaaatataagagaaaagagcaaaaatccgaggagtcaggactgaaaataaatataagatcaggagggaagcagggattcgcaaggaatcgatgcgagaaaattatgtgtacagcagcaacttataaaacaaaagatttttattttggaagaacgttagattatgaattttcttatggagagcagattgcagtgacaccgcgcaattatccgtttcatttccggcatatgggggatgtggcaaaccattatgcgatcataggaatggcgcatgttgcagcagactatccgctgtattatgatgcggtcaacgaaaaaggcgttgggatggcaggactgaattttgtcggaaatgcgtatttcccggaagtgacagagggaaaagaaaatgttgcctcctttgaatttattccatgggtgttgggacagtgtgccaatataaaggaagtacgggaactgctggctaagatcaacattaccggaacaccttttgcggaaaatatgccggcggcttccctgcactggatcatcgcggatgctgatgaggctatcacggtggaatccatgaaggatgggctgaaaatttacgaaaacccggcgggcgttatgacaaataacccaccgtttgaccagcagatgtttctgttgaataattacaggggactttcgccaaaacagccggaaaacttgttttccgagaagctgccactgcagtgctatagccgtggtatgggagcattgggcctgccgggagatctttccagtgcatcccgttttgcaagggtggcttttacgaagatgaactctgtttccggtgattcggaggaggagagcgttggtcagtttttccatattttaggatccgtggagcagcagagaggatgctgtgaagtggcagaaggaaaatatgagatcacgatttatacttcctgttgtaacgccacaaaaggtatttattattacacaacttatacgaaccgccagatcacagcggtggatatgcacagggaagatctggatggaagtggactgatccattatccgatgctggaaaaagagcagatcctctggcagaattaataaaaaaatagttaagatttggaaaaatttttataacaaaattgacaggacaggcattcttatattaaactaacaaatataagagggagtagttagcatcttcggatggaatagtagtcgtcatcacgctgaaaggccggttattattgtaagtaacgagacttttatcactcaaaaaatttttttgatgcgataaaggtctcttttcataatcaatcctttatcgcaggaaaggaaggcgttatggaatatttactgttactcgttggttttgtacttttagtaaaaggtgcagattttttcgtggagggaagttcttctctcgcaaaaatcatgaaagtgccgagcgtcatcattggtcttaccattgttgcgatgggaaccagtgccccggaggcatccgtcagcattaatgcggcgctcacaggcaataatgacattgcgatcagcaatgttgtcggttcgaatatttttaacggtcttgtggtggtcggtatctgtgctttcttagcaagttttaagacaaatctcgatattttaaaaagagatatgcctctcaacattgtgatcacaatgattctctgtttcatgtttatggatggaaaactgagccgtatcgaaggtctgattctattggcaggaatggcagcatatattgtaagcatgatttattctgctttgaaaaatcgtgaaactggcgaggattgtaaggtactgtcgctgccaaaaagtattgtgtttatggcaggcggtcttgtggcagttatttttggtggggatcttgtggtggataatgcctgtgtgatcgcagcgaattttggtgtcagccagaactttatcggacttacgatcatagcgatcggaacatcacttccggagcttgtgacgtccatcgttgcaaccagaaagggagacagcggtcttgcactgggcaatgcgatcggatcaaatattttcaatattctttttatccttggtatgtcagcagcaatttcaccacttaatgtgttaggagaatccctgacggactgtatcattctattgatcagcgcagttattttgtttgtgttggcaaagaccaaaaagacaatgtcaagatgggaaggcgcggtctgtgtactgttgtatattgtatacacagcatatctgctgattaggtaaaaatagcacagatctgggagaggtgattttctgcggacaaaagtagcaaaagaaaccatgcatttataaaggaggtcactttatgacaacatatcttcttattacagcggtagttatttttgcctgtgtattcctgagcaaggtgtcaagcagacttggaattccaatgctgcttgcgttcattttgcttggaatgctgtttggttcggatgggattttaaagattccgtttgacaattatgcgtttgcagagcagatatgtacggtcgcattgatcttcattatgttttatggtggttttggaacgaactggcagcaggcgaagtccgttgcggtaaaggcagggctgttatcgacggccggagttgtgataacagctgcacttaccggagttttctgtcattacgccttacatatcgcatgggtggaaagtatgctgatcggtgcactgatcggttccacagatgcggcgtccgtattctcagtgctgcgatcaaaacggctgagtctgcgttataatacggcttcccttctggaagtggaaagtggtagtaatgatccgtgcgcatatatgctcacggtgacatttatcgcgatcgcacagggcagcgccagtggtggacagattggacttctcattgtaaaacagatgctttttggcattctttttggtgggttgatcgcggcagctgcagtgctgctgttgaaaaaaattaagttttcgaccgcaggatttgacatggtttttgtggtcggaattgcagtgatcgggtacgcacttccggcagtttttggtggaaatggatttttaagtgtctatattgtgggcattgtgctcggaaatactgagatccgcaacaaacggaatctggtaaacttttttgacggactgaccggattgatgcagatgctcattttctttctgctcggacttctggcatttccatcgagactgccgcaggtggtgcttccggcacttctgatcgcagtatttctgacatttgtggcaagaccggtggcagttgcacttgtactcacaccgtttaaaggaaaaatttcacaacagcttctggtgtcgtgggcaggtttgagaggtgcagcgtccatcgtgtttgcaattatggcagagatggcagtggaaacagaaaatgatgtgttccatattgtttttatgatcgtgctgttttctatcctgcttcagggctcgttgctgccgcttgtagcaaagaaactggatatgatcgatgaaaaaggcgatgtcatgaaaacgtttaatgattattccgatgaagttccggtgcagtttatccagctcagtattccaaagagccatcactggtgtggaaaaacattaaaagagctgacacttccgccggagacactggtcgtattattaaaaagaaatggagagaatatcatcccaaatggggataccaagcttctcgaaaacgatgttctggtcttaagcgcaacttcgccggatcatgtcgagggtgtatcacttgttgagatttatgtggatgaaaacagtaagtataacggaaaattgttatcagagattccaaagaaagagaatacgttagtgattatgatccagagaggagagcaggtcattatcccgcacggaaatatccggctggaaagtggcgatatgctggttgtgagcaaaacggaaatctgatttacagacggagatccgacagaacgtaataattactgattttactctaaggaaaatcaaaaaatgtccgataaataacgtgaaagcgaatttcaaggaagaaaggagatgcctcatatgcgtatagatgcttataatcagatcgcgcaggtatacaagacgacaagcgcagcaaagttacagaagacagagaatgcaaggcatggacgtgatgaagtacagatctcgtcttttggcagagattatcagatcgcaaaacaggcagtcactgaagcagcggatatcagggaagataaagtcgcagaactaaaagcaaaggttaactctggtaattattccgtggatactgcagattttacgaaaaaattattggaaaagtacaacacatcattaatgtaaaagtgaggatgaattttggctagtttaatggaagacctgatcgacgttctgaaccaggaagaagaacagtatcagggattgatcgaactcggaaagaaaaagagggaagtggtgatccgggcggatattaagacgctggatgagattaccgcgacggagcaggaggctgccagcaatctgcagaatctggcgaagaagagaaccagagtactcaacgacatggcaacggttcttggcaggaatccgggagatgttacgatcacaaagatgatttcttatctggaggaacagccggtcgagcagaaacagctcatggaagtaaaggagcggcttttacagacaggaaaagagatggcagccattaatgaacagaatgagatccttttaaatcaggcattagagatggtggagtttgaccttacattgcttaagagtatgcgacaggcacctgagaccgccaactataataagaacgcctgcaatacaggtgatctgcttggcagcagtggctttgacgcaaaacagtaatatgtaaggagggagcaccatggctaacggctttggaagcttatatatcggagcatccgggttacagaattcccagaatgctttaaatacaacatcaaacaaccttgcaaacgtaaataccaagggttatgtacgtcagcaggttttacaggtagacagaaactacacaaccttcaatacaactgcatcgatcagccagcagcagtctggtcttggtatgaagatcggtgatgtagtgcatgcgagggatatttttctggataaatcatatcgaaacgcatcaggacgtcaggcatattatgcagccacgtatgaagcagtggacgaggtttacactttttatcaggagttacagggacaggctttccagacaactctggaggatttctggacagcttttcaggaatgggcaaaagctccggatgacagtgtgcagcagaatctggtcattcagaaggccaatctgtttgtcagcagatccaatgcagtctatacgggactttccgactaccagagcacgatcaatacacagatttcagatgatattgatcggatcaatgagctgggaaataccatttttaaattgaatctggaaatccagaaagtagaatcgggtaatgttgagactgcaatgacattgcgtgatgagagagataaagcgctcgatgaactcgcttcttatgtagatatcagttataaagagaattctgatgggattgtaaaggtaagtgtcgaaggtgttgaatttgtagacgaggcaagatgttacgagatggggaagaaccgtgatgagatcacgggatttgttacaccttactggacacatctttccgatatcgagaatggcgattacgataatgtattcagttttacaacaccgatctcctcggatcttaataatgatcttggagaattaaaagcactgatcctggcacggggagacagaaaagcgacttataaagatattgtagggctgacatcggatgaatataaccgttctacaccggatgcgattgcaacaggaatgtctgtcatgttacaggcacaggcgcagttagatcagttagtacacgggatgatcacagcgattaatgatacactttgtccgaatacaacacttggagaacttaccggaaatacagcatcccttaccggaacagatgagaatggtaataccgttacgatcacatccggaatgaaagtgctggatacgaaaaactgctctaccggaagtgacaaacagattccgccacaggagctgttcacaagacttggtacagagcgttataccaaagtttctgtgcaggagacagatgccaatggcaataccgttaccaacgattattatgtatacaatgaagagagtgagacagatacttccaaacagtatacattagcgagtgtcagtgtaaatgataagctggtagaacaggagtcgctgcttccacatctttcacaaaatgggaaagtgaattatgatctcgcccagaaagtagcagctctctggaagggtgagtatcttaccctggatccggatgacacgaataaagttacatttattgattactataataatatggtgggagcatttggaacgatcggttccgtttatgaatccacagcgaaaagtctttccggaacagtgacagctgtagataatcagagatcacaggttatgggagtttcttctgatgaagaattgaccaagatgatcaagttccagaatgcatataatgcatccagccggtttatcaatgtggtgaatgaaatgatcgaatccatgatcacacagcttggctcataaagaccggattttttagtggaacaaaaacagttactttcacagattacatagcagaaagagagaggtgagaggatgccttcacaattttttggattaacaattgcatcgtcaggcttaagtgcttatcaggcagcacttaataccaccgccaataatatatcaaacgaacagacaaagggatacagcagacaggcagcaaatctttccgcatcggatgcacttcgtgtcaatgcaaaatacggaagcatgggttccggcgttacggtgaattccattaaacagatccgaagtgagtactatgatacaaaatactggcagaatcaggcaagccttggtctgtatgagacgaaattaagttatctggagcagattgagaactattttattgatgatgatacagaaaaaggtttttcgaccattttaaataaaatgttcaattcattggacacattaaaaaataatgccggtgatgtgaatgtcagacagcagtttatctcagatgcacagagttttaccacttactttaacagtgtggcaaccggtcttggcgagattcaggacagtgtgaacgaggagattaaatctaccgttgaaaatatcaatgcgatcggcaaaaagatcagtcttttgaataaacagatcaacgttattgaagtacagggcggttatgcaaatgaactccgtgatcagcgggcacttctgatcgatgagttatcctctattgttccaacagaggtttcagaagttccggtaacgaattccaaacatccggacatgcagacaggtgcaaattattatacggtaaaaatcaatggacagaagtttgttgatacttacgagtatagtgaacttacctgtgtggcaagaaaaaacacgatcaatcagtctgaccgggaaggaatgtatgagattgtctgggcggataccggaaacagttttaaagcaggttccgactccagctccggttcgttgaaagcgttgttcgatatccgggatggtaacaacagtgagaacttccgaggctccatcaaaggggttacagcaggcacaattacaatcagcaatccatccattacaaacgtcaatgccatgactatgccggcagagggtgttctcacgattgatggaaagaactataactatacagactttacttttacgacggatgcagatggaaatgtcaaggaatatacatttacattggagaatcagttgagttccgatcagcaggcaaagatagatggaaaacaggcatctatcggcgaatccatcgatgcgatgggtattccttattatcttgcacagatgaatgagttccttcgtaattttgcgatttcatttaatgagatcatgaatggcgataatgcgcaggatctgaatggtaagcagacaaattatttttctttctttacaggtacacataccaagacaggagaagagtatcatttcagcaaagcggctggtgattataatgcgaaagcaagtaacagttactatcagcttacctgtggaaatgtatgtgtttccaatattgcggtcaaagatccgacaaccattgcaacaaccgagaagattaccaatggtgcagacgcatatgatctggtagagaaaatgttattgttaaagagtgatacagagatgtatcgtggtggtggtgcagatgatttcttacagtgtatgatctcagatatttctgtggatacacagaaggcgaccattttccagaaaaattacagtaatatttcaaatgcgatcgacaagcagagaatgtccgtttccggtgtcgacaaggatgaagaagcaattgatcttgtaaaattccagaacgcgtataacctttcctcaaaaatggtatctgttctggcagagatttatgataagctgatcaatgagacaggtgtataaaaatttcgtgataagaagagaggagtcatcctatgagagtaacgaataacatgatgcttcgtaatacaacttcgaacatcaataacaataaatacagtgtgaacagtctgaacaatcagatgtcttcacagaaaaaaatctcaagaccttccgaggatccggttgttgccatccgcgcacttcgtctgagaagcaatttaagtgagatcaatcagtattatgagaagaatatcccggatgcagatgcgtggcttaatgtgacagaaactgcgttggagaatatgaaaaccattttgtcagatatccgtacccagtgtacgtatggagccagtgaccagttgaaagcagaggatagaaaaacgatcctgacacagttagagtcattgcgtaagcagatttattcagaaggtaattctgattatgcaggaagaaccgtttttaccgggtatcgcacgaactgtaaattgacatttatggaagacgagagtaatacggagtataatatccagcagaagttcagctatgaagatatcggggaacatcgttattatgatggacaggtagagcttaagacagcagaagaaatgagtcagaaggtcaccacctctgatacgaagcagtatacttatgacaggatccggctggcgtatggaaatattggatctctcaaagataaagacggtaatgaaatagctgtgggcaacacaggaactctctcttatcattacacagataacacaggtgcagcaaaaaccggtgatttaaacgtaacggtctatgagacagaagatgactggaagaaagcagtgaaagctggaaatatgccgaaagatggagcagctttcatcaagtcaacaggagagcttgttttaggtaatgaggcaagtgagactttgaaacagaataaggcatccattgagttaaactatgataaaaaaggctttaattctggtgaagtaagacctgagtattattttaactgcacagatattacagatgctaaaaataaaattacatatgaaaaatatgatgctaaaggtaatgagatttatcaggatatcgattatattatcgctgtaaaccagacattgacagtcaacacaaacgcatctgacgtattcaatgcagatatcggacgtgatgtggacgagatgatcaatgcggtaaaagctgccattgatgccaatgacaaagtggataagattaaagatatgatgaatcaggcagcgtattcgggtgtttcggcacaggagaatctgcagacatggttagaggcagcacagaaggaagcagattatgcaaatgacaatctgcagaaattgtatgacagctatatcggtaattttgatgaatatctttcggatgtaaacctttccattacaactgtaggaagcaagggcgatcgtctggaactgacagagacgcgtatgtcaaaccagcagctgaccataaaaacattaaaatcaaataatgaggatcgtgaactttccgatatcatcattgattatacagcagcttacactgcttatcaggcatctttacaggcggcaggaatgctgaatcagacaacattgttaaattacatttaaggcatgctgtggaaagtgtgtgataagatggtcggagaccagacgttaggaaaacgttataaaaccaggaggtcagaaagatgaaagcaaaaacaagaatgtttggcgaaattgatattcaggaggataagatcatcactttggagagtggaatgatcggctttccggatatgcagaagtttaccttgatttttgatgaagagaaaggcagtaaatcacatattatgtggcttcagtctatggatgatccacagactgcgtttccggtcatcaatccggtgacgatcaaggaggactataatccatctgtcagcgaggaattgttgaagccgttgggagatatgaaacaggaagacacctttgtacttacaaccgtcagagtcccaaaggatattcaggatatgtcgatcaacctgaaagctcccattattatcaatatgtccaacaatagaggggcgcagattatcgtggaagatgatcttccggtacgttataaaatttatgacctgctgaaaagtagaaaagaaaaggcaggtgaatagaaatgctggcattgacaagaaaaaaaggcgaagctttagtgatcaataataatattgagatcacagtattagagatccgcggggatcagatcaaaatcggtatttctgctccaaaggatgtaccaatttaccgaaaagaagtatatttacagatccagcaggaaaatgaggctgccatcagtgcagatggtctggatgcgttaaataatctgttggattagaaaagaatgatacccgaacgggtgtacaatttattgaaaaatattaaattgtacccgttcgggatttttttgcctgaaaacgttgaaattatacccgaacgggagtattatgattgatatgaataaaattggaaattatataaaagaagaaagaaaaaaagctggattaacacaggaagaatttgccatgagatcaggattaggcttacgttttgtaagagaattagaacagggaaaggaaactgtgcgtatggacaaagtaaatcaggcattggcaatgttcgggaaagaagctgtaccgggagaaaaggaggaataacaagtggagtcagaatatagaaaaggatatgtttatattcaaaaaatttttgccggaacaatagctgaaacagaagaaggatatgagttttcttataatgaggattatttgaaaagagaagatgcagtatctgtaagtttgacgctgccattacaaaaagaggcttataaagcgacagttttatttcctttttttgatgggttaattccagaaggatggctccttggtgttgtaagccgtaactggaaaatcaatcagaatgacagatttggattgctgttgtcggtatgcagggattgtattggagatgtcaatataagaaatggggaagaggaatgaaatgtctatgttgtggaaaaacaataagggagaatgcttctaatgcggaaaaggagtggagctggcataaaaaatgtgtgaaatcgttttttatgacagaagaaatgccctttttagatattacgaaggaacaattggaaaggctcgcaaatgagactgtcaatgagggacttacagtaccaggagttcaaaaaaaactatccttgcatttgtccagtgacacgaatgcaagacttacaattgtagattatccaacagggtatattttaaagccacagacagaagaatttgattatatgcctgaatttgaagacctggcaatgcgtctggcagagttgatgggaatccagacagtgccgcatgcactgataaaaataaatgatgagtacgcttatattacaaagagagtagatcgcgatattgaaaaaaatgagataaaattatatgcaatggaagatttttgccagctatcgaatcgcttaacgcaggataaatacaaagggtcttatgaaaactgcggaagaatcataaagaagtattctattacaccagggttagatttatcagaattatacttacgggttgtgggatcttttatcattggaaattcggatatgcatttgaaaaatttttcgttaagagaaactgaaccgggaaacagaaggtttcaattatcaaacgcatatgattagcgcctattaggaaaacacactgtcaaagg

SEQ ID NO: 14323 - DNA, 10556 bp, Unknown
  gut microbiota DNA sequence
tgctgtcaagggaggaacagggattgagcctgtaaaaatggtcacaacatgggtgctctgcgcctgtgccggaactgccggaggcatgatcagttaaaaaaagacttttcttatgaaaaactatgtgttatactataaaacagcgaaaaagatttttaaaggagagataatcatgaaacacgttaaaacattaaatactagaaaattacagaacacaatgaaaaaaggtggatgcggcgaatgtcagacatcctgccagtctgcctgcaagacatcctgcacagtaggaaaccagacttgcgagaacaaataagttttacaaaaaagtaaataataacattcacaaacgaccgttcgcgcagcgtgcggtcatttgtacgttatatagatattggtaaagataatagaaagtgaggaaatattatagtggttcatcagtataagaacaacggctatgatattgttctggatgtaaacagcggtgcaatccacgtggttgacgatgtaacatatgatgtcatagaaatgtatgctgcacgcgagaaggtagaagatacttctgcagaggagattgtaaacgctttatccggtaaatatggaaaagaggaagtagaagaagcaattgatgaagttcagacattgatcaaaaatgaggagcttttcacaaaggacatttatgaaaactatatgatggattttaagaaacgtcctacagttgtaaaggcactttgcttacatatcgcacatgactgtaaccttgcctgtcgttactgcttcgcagaggaaggtgagtatcatggaagaagggcactgatgtccttcgaaacaggtaagaaggcactcgattttctgatcgccaattccggcaacagaagaaacttggaggtagacttctttggcggagaacctcttatgaactggcaggttgtaaaagacctcgtagcttacggcagagagcaggagaagatccatgacaagaatttccgtttcacacttacgacaaacggtgttcttttaaatgacgagatcatggaatttgcaaataaagaaatgggcaatgtggtattaagtatcgatggaagaaaagaagtccacgaccgcatgagaccattccgcaagggagcaggaagttatgatctgatcgttccgaagttccagaagtttgcagagagccgtaatcaggacaagtattatgtgagaggtactttcacacacaacaatcttgatttctccaatgatgtgctgcatcttgcagaccttggatttaaacagatctcagtagaacctgtagttgcacagccgacagatgactatgcgatccgtgaggaagatcttccacagctttacgaagaatacgacaagctcgctgctgagatggtaagaagacataaaaatggaaacgattttaatttcttccattttatgatagatctggaaggtggaccatgcgtggcaaaacgtctttccggctgcggttcaggaacagagtatctggcagtaacaccttggggtgacctttacccatgccaccagttcgtaggaaatgaagatttcttactcggtaacgtggacgaaggtatcaagcgtcaggatatctgcgatgaattcaaatgctgcaacgtttatgcgaaggaaaaatgccgcaactgctttgcaaaattctattgcagtggtggatgcgcagcaaattcctacaatttccatggggatatccacaatgcatatgatatcggatgtgcgctccagaaaaggcgtatcgaatgcgcaatcatgattaaggctgccgaggcagacgaagaataaaggaagggtaaaacaatgaaaaagagtaaagcagcagtcatattggcagtgatcattgcagcatttgcaggacttgcctattatgcatcaattattctttcatccactggaatcggcgaagatatgtcaattccactgggcttggatctctccggtggtgtttccattacttatcaggtagtggacgagaatccaagtgctgaagatatgagtgataccatttataagcttcagaaacgtgtagacagttatagtacagaggcttccgtatatcaggttggtgatgacagaatcacagttgagatccctggtgtgcaggatgcaaaccagattttagaggaacttggaaatccgggttctctggaattccagatgccggacggaacagtattcatgactggtgatatggtggcagatgcacaggctgcaacccagacagatacttatggcaacaaagaatatgtagtttctttaaaactgacagatgaaggcgccaagatttttggagaagtgacatctgagaacattggcaaaaatctcccaatcgtatatgacggtgagacaatcagttacccacgtgttcagacagctatcactggtggtgaggcacagatcacaggtatggcaaattatgaggaagctgagtcacttgcaacacagatccgtatcggttctctttcattacagcttaccgagttagagtcctctgttgtaggagcccagttaggaagccaggcaatttcttccagcttaaaagcaggtgcgatcggacttgctgtcgttatggtatttatgatcgtaatgtacgcagtacctggtgtggcagcatctttagcacttgcaatctatacaacattagtgatcgcaaccttatatctgttcgaaatcacactgacacttcctggtattgcaggtattatccttggtatcggtatggcggtggatgcgaacgttatcgtatttgcacgtatccgtgaggagattgcaaccggaaaatcggttcagacatccatgaagatcggtttccagaaagcaatgtcagcgatcttagacggtaacattacaactttgatcgcagcagttgtgcttatggcattaggttccggtactgtaaaaggatttgcatatactttaatgatcggtatcatcctttcccttttcacagcgatggttgttaccagatatattctttattccctgtatgcattaggacttaagagtgaaaaactttacggtcgtgcaaaagagagaaagagcatcaattttattggaaaaagagcagtattctttacggtttccggtgttattatcgcagccggactgatcagcatgggagtacattcagcgacagaaggcaaggcattgaactatggtcttgatttcatgggtggaacttctacaactgctgattttggaaaagatatgtctattgaagatattgagagcagcattgttccttatgtagaaaaagtaacaggtgactctgacgtgcaggcaacgaaagtggaaggaaccacacaggttacgatcaaaacacgtactttaaatttagatgagcgtcaggcattagaggatactttagtggatgactgtggtgtggatgctgcaacgatcacatcccagagtatcagctccacgatcagtggtgagatgcgttctgatgcattgaaagcggttgtcgtagcatgtatctttatgctgctttacatctggttccgtttcaaagatatcagatttgccgcaagtgcgatccttgcattagtacatgacgttcttgttgtgatcactgtttatgcgctggttcgtatttctgtcggaagtacctttatcgcgtgcgttcttacaatcgtgggttattctatcaacgacacgatcgttatcttcgaccgtatccgtgagaaccttgcattaaaaactggaaaacagacagcagaagacttaaaagagatcgcaaacaagagtttgacacagacattatccagaagtatcaatacttccattacaacattcatcatggttgtaatgctctacatcttaggtgtggcaagtatccgtgacttctcacttccacttatggcaggtcttgtatgtggtgcttattcttcaatctgcatcgcaactgaactgtggtatgttatgaaagtgcatgttggaaaaaataaagtaacaaaataattgcaaaattgcgagcaaagcggctgccttttggggcagccgttttttggtaattctgggagtttcgaaattattcaatatggaatttgaacgaagggagacaagcgtgtgttaaaaggagttatcgtctatttgattattatgaatattgccggactggcggtaatggcactagacaagagcagggcaagacgtcatgcgtggcggataccggagaaaatgctttttctggtgagtgttttaggtggcagcattggaacgtgggcaggaatgtacttgtttcatcataagacaaaacactggtattttgtagttggaatgccgttgatactagtgctgcagattgtactttttgttttgctggtgagataggcaattgcagtattcagattcatgttataaggaaatgagtgaaataaaaaataaatttggaattgaatatttatgacaagtcctttataatgagttttaaagttttgaaaaaacacatgtctttgagagaaagacagagatgaggaggcattatgtatacattagaagacattcaggcagtggatatggaagtggcacaggcaatcaccgatgaatttgacagacagaacagccatattgagctgatcgcatccgaaaactgggtaagtcctgcggtcatgtcagcaatgggaagcgttatgacaaacaaatacgcagaaggctatccgggaaaaagatattatggcggatgtgaatgtgtagatgtggtggaggaactggcaagagagcgtgcaaaagagctatttggctgtgaatatgtcaatgtgcagccacattccggtgctcaggcaaacatggcagtacagtttgcaattttaaaaccgggtgatacgattatgggaatgaacttggatcatggcggacatctgacacatggttcgccggtcaatttttccggaacctatttccatgttgtaccatatggagtgaatgatgagggattcattgattatgataaagtagaagaacttgctatggaatgtaagccgaaaatgatcattgcaggagcttctgcttatgcgagaacaattgatttcaagagattccgtgagatcgcagatgaatgtggtgcggtgttaatggttgatatggcacacattgcgggacttgtagcagccggacttcatccaagcccaatcccatatgcgcatgttgtgacaacgacgacacacaagacactgcgcggaccaagaggtggaatgatcttaagcagccaggagatcgcagataaatataattttaacaaagcaattttcccaggtattcagggcggacctctgatgcatgtgatcgcggctaaggcagtctgcttcaaagaggcattgcagccggaatttaaagtttatcagcagaatatcattgataatgcacaggcactctgcaaaggattgatgaaccgtggcattaagatcgtatccggcggcacagataatcacctgatgcttgtagatctgacaaactatgatctcactggaaaagcggttgagaaacttttggattctgtcaacattacctgcaataaaaatacaattcctaatgatccgaaatctccgtttgtgaccagtggagtgcgtcttggaactccggcggttacttcccgtggtttaaataccgaagatatggatcagattgcggaggcaattgcgatgatgatcaaagagggagagcctgcggcagacaaggcaagagcaatcgttaaagctctgacagaaaaatatccattgaaataatagggtacaggattggacaaataagctgttatcatgaaaaagagactatgagaaaaagtttgtaaataagattcttttatgatgataatgaagggcaaaaagaaaaaagagggaaggtgtaaaaatagcatcttccctcttttgcgctcatttatcgtgcaagaacgtcaatgatctgaccaacatacatggtgtgcatatcaccgtctttgtaccatttatctgcaatctcggaatcgaggaaagaatcatctgtgattctggtggcagacattttttcacagactaagacaagatttccctcgtcaatatatgggattccatgacggtagtccacggaaagcccggcatttgcaatcttatcttcgttacgaccggagtgggagccacagtaatttaaagcattacgatactggtcgctgacaaaggtaagggagaaaaagtctccttcatcgatcagctcttttgtgtatctggaatcgcggacaaaaacatagaccacgttttttccccataagacaccgacaccaccccagctaatggtcattgtgttggatttctgtttgtttccggcagtgagcagcgcccattctttgccgattttggtaaatggattcatgtccagcatatcaactggaattggttgaaatgtatgcataggaatcacctcacgtaattttttgataatcttattatattatatgagatcaaaaaagtcacttgaaatatagaatacataaaattgtaaattgtacgaatacaatcagagatgaatatttcacgtcttgagtacaaataaaattaggttatggaaataataataaacaataactataaattatatacgatataaggctctggaataatcttgacatgaaaaaaagaaagtatcataatgtgtttcagaatcaattttccaataagttagtggaaaaacaaggaggatattatggatatcagatttgagaaaagaccagtattaaaggagaaaccagaccagaagaatcttggttttggtaagtatatgacagactatatgtttgttatggattggacaaaagaagacggatggaaagatgcaagaatcgttccggaaggacctatcaccatggatcctgcatgtgtaacacttcattatgcacaggaaacattcgaaggtatgaaagcatatcgtacagcagagggcaagatccagttattccgtccggagatgaacgcaaagagaatgatcaattccaatgcaagactttgcatgccggaattcccggttgatatgttcgtggaagcagtagaagcacttgtgaaagtagaagctgactgggtaccgtcagaacctaacacttccctttatatcagaccatttatgtttgcaacagaagctgcactcggtgtacatatggcaaacgcatacaaattcatgatcatctgctgtccggtaggtgcttattacgcagcaggactgaatccggttaagattttagttgaggacgagctggttcgtgcagtaaaaggtggtacaggatttacaaaatgtggtggtaactatgcaggttctattttaggacaggtaaaagcagaaaaacttggttatgcacaggttctctggttagacggtgaacatcgtaaatatgtagaggaagttggaaccatgaatatcatgttcaagattgctggcgagatctacaccgcaccaatcgaaggaaccgttcttccgggtgttacaagggattccatgatccatctgttaagagactggggatacaaagtaaatgagacaagactttctgttgatgatctgatgaaagcaggacatgacggtacactggaagaggtattcggtacaggcacagcagccgttatctcaccagttggagaacttcgttacaaagatgatgttgtaacagtcaataatttcgagatcggtgaattgacacagaaattatatgatactttaaccggtatccagtggggaagaattgcggataaatacggctggacagttgaggtaaaataatacaaaaaagaactactagacaatttatgcatatcatagtatagtagttatgttatagatgccttcataaatgtagatgcatttatgaaggcatttacaatatatagcacattgataatcgaataaggtttatattttcagatatgcaatcctgtctgtgaccgattgcagacatttggatttctcttctagcgccatgtacctgtgaggacgaatatgcacaggttaacgaggaaaagggttatcgaaaattcggcggacgccctttcgtacctcccagtgcgagatatgccggcaaatatgcaggtgactgcaaaacaaatacggtataatgggacaataaatatgaagaagattggtaatgcttcaatatttttgatgttaaacattacagtaaaaatgaaataaaaaagaagaggaaatttaatatgtgtggaattataggttatacaggcagtgagaatgtaaaagatgttttattagatgcgttggaattattagagtatcgtggatacgacagtgcaggtatcgcagtggaggatgaggtttcccatgagacaaatgtttataaatgtgccggaagagtaagtgatttaagagcaatttgtgagtcaaagaaaatcttatcaacctgtggtatcggacatacaagatgggcaacccatgggggagtcaatgaccagaatgcacatccgcatcagcagggaaaagtaacactggttcataatggaattattgaaaattatcgtgaactgatcgcagattatgatttgcaggaaatccttcattctgaaacagatagtgaagttgcggctgcattattgaatcattattacaaaggcgatccaaaagaggcaatcaagaaaacagtaagcaaattaaagggtacatttgcgcttgtcattctttttgaagaccagccggatgtgatctattctatccgaaatgtcagcccgatcgttgcaacaatctgcaaagagggagcaatgcttgcatcagatctgactgcactttgccgttttacaaacgagtactttgttgtacctgagtatcatattttagagttacacaaagaccaggttgtgcttactgatttaaatgatcaggttgtggaaccggaatttttgtctgtagactgggagttaaacagcgcaggaaagaatggttatccattttatatggaaaaagagatcatggagcagccggaagcaatcaaaaatacgatcaaagaccgcattgtaaatggacttcctgattttaccgcagacggtgtgccggattccctttttactgactgtgacagaatctgtgtagtagcatgtggaaccgccatgcatgcaggacttgtggcacaggctcttgtaaagtctatcgttcatgtgcagatggatgtggaacttgcttctgagtttatgtattcagatccggtcattgatgagaaaacattagtgatcgcagtttcgcagtccggcgagacgattgatacattggaagctttgaaatatgcaaagagacagggcgcaaaatgtctgtcagtcatcaatgtaaaaggttcttccattgcaagagaaagtgattatgttttatacacttccgcaggaccggaaattgcagtggcaagtacaaaagcttacacaacacagctttccgtattttatctggtagttgctaaaatggcactgcttcgcggcgtgtatacagaggagcagaccagaaactttattgcagaattagagcgtgttccggaagtgatgaaaaaagttctggacgagagacgtgatatccatgtgatcgccaagagaatcttagaagcaaaagatctgtttatgatcggacgcggattggattattctattttattagagggatcattgaaactcaaagaagtttcctacattcattctgaggcgtatgcttccggtgaattaaaacatggtccgatcgcgcttatcacaaccaacacaccggttgttgcaactgtaacacaggaaaaactcatgtcaaaagagctttccaatattaaggaagtaaaatcaagaggtgcagatatcgtattatttatcaaagaggcgctttccggtgatcttgatacagagtatcaggtgatcaaacttccaaatatgcaggatgaattcatggttctgcctgcatcggttgcattacagctgttggcatattatgtgtcatctgacaagggatttgatgttgataagccaagaaatcttgcaaaagtagttacggtagagtaaaaacgatagaatgtttggggagttagtttttgaaattgaacgataaaaatgactgataagttgggaaatcaaatgttttgcacagggagcagaacaggattgcgtatctgagcatataatataaggaaatgtatgaagaggttgttcatgccagatatcaaatatgcccagacagaggctgtagataaaggaagcctcaaagtagaagtacttacaaaccggaccagaagaccgattgagggagcaagaatcaccatttcctattctggggatccggattccaaagtggaggaggtaagcgcggatgattcgggaatgtcggaaaaacttacgcttgatgcgcctccgcttgaatactcgatggaaccctccgaaaatcagccgtttgcccaatatacggtcaaagttactgcacccggatatcgtcccgtcagtatttcgggtgttcaggttttttcggagcagctcgcattgcagcaggtgcgaatggcggaagaaaatgaagaagaaaatcaaatagattccattgtaattccagtcaacacacttttt

SEQ ID NO: 14324 - DNA, 1093 bp, Unknown
  gut microbiota DNA sequence
gtaggctttctttaacaatgcagcaattttagcaagaacaatagcgggattataaggctttgtgataaacgcatctccacccagcataatgctgttcagttcgtccatatctgtattgctgcttgttacaaatacaatcggaatatctgaaaaggtgcgaatttgagagcatatttcaaaaccgttattcccaggaagttttatatccagaataaccagatgtggcgcagcttcttttaactgctctattgtttgggaaaaatccgtaactgcaaatacttcatatccattcccagacaaaagagttttaagctgtgtttgtatcgtaaaatcatcttcaatgattagtattttttccttcatagagatacctccctgacactttattatactgtatcagagaggctttctcaatccatattgaagaatagtaacggaataatgggcggttgtctatcaaattcttgtgtgttactttaccgcacatgagcattatcacttgtgctgatagtatccagataattcttttcttttccatttgcagtcagactctcagagaaggaataaggatatatattcatgatgacaaaacggccgcccagtgtagaagcaatttcgctgttgagcattttgctgatacatcatgtaggatttgccggttcttctgatgccgacaaaacaatagtttatattttcttccagaggatagtgtctaacgattattgggttgtttaggtaaatatccttcggctgtcttgtaaagcataaaatacagacgtagtgaaaaaatatggtcgattcaatgcattttacggtcgattcatgacaatccgcccatttggaaagaaatccgttgtacattagaaacaggtaatcatgtacaacgaattttttacattaaaagcaaaggagaaaaaggaatgaaaaagttgaacaaatggatagcaggattgctgtgtatgatgcttgtcataaccatggttgcaggactgggtgtgacggaagtgaaggcagatgatgcggtaacgcagcatgtgagtacgtggactgagttaaaaaaagcaataagtaatggtggcgacattcaattgac

SEQ ID NO: 14325 - DNA, 44396 bp, Unknown
  gut microbiota DNA sequence
gccccgaatagagctgctttaattggaaagtttagtcaatcaatgaattcaggtaatatgtcagcaatgaaagaagttgaggaagcagacaaaaaatggctctgtatgctgtttggaataccttatgaggcaaaatatcagggaacagggacaggctcggcaattcatgtatacaatgaagagggcgaagaagttttgacctatacagggggagtaggctggcaggaaaaagaaacaaaagcagagtcacaggttcattcagcattaaaaatgacatattatgaggcatttagtgaggcgagaaaagcattaaatagtgaagaaaagactggtagtgtaggtgaaaacataatattgcaagataattttgatatgaaggcatgaagtatgcaattaaaataacagtaacttctacagtgttcattgcagatgcacaggggcatataaagagaataatttgtggcaggactttaaagccgtgacagttattattgatccgtcaacaggtaagttaatagatatagaaaattttaattattattatgattatgcagtaggatcaaattctttgacattcaccagacgttatccgtcaatgacattgtataaatatggaaattgaggtgacaatatgaaaatatctaattacatgaataatacgaattcaataatggaaaaaaatactgataaagtacagaaaggaaatagtcagacaaacgaaaaacatacagtggggcaatcagtgaagctttcgatttctaatgagggattggagtattatcgtaatcgtatacagcagagtggacaggaaaaatatgatgatgtggttcaaagaaaggaactgttagcgagtaaaaaaatcagtgatattgattatagttatgaaattcaaaagaaggcagcacagcagaatcaaaatgttgatacaggaaaaagtgccttaaatattactgacaaggcaaataattatgttaaagcatacgcagaattatatgatgaaattgtgaagggctatgaaaatggaatcagagaaatatatgtagctgatgaaaatggacctcgtaagcttacacgggatgaagaattaagcaatttagatgtagcatataagaaaatggtggatgattttgtgacaatggagacaacaaatcagcatgcccgtggaattattggtgaagaaatgaataaaatttcaaaaattacatcaaggtctgcattagcgtcagattacattggggaacagaaaacaaagggaaaggacggaatcccagaaaatttaactgagaaaatgtatggtgcaatcacatcatttaaggaaaaatatacaatgattcatcataatcaaaatcagttatcgcagttattgatgagtgttaaaatttaaaggctaaagattaatgctttggaagaagataagtttacattgatggaaattaaatactcaagccattcgatatgattatgacaaacacaaatgttaataatgcctgccgtatgtggaagaaaaaagaatccaaactggaacttgctgccaccatgatccgtaaagtcatgcctcaatttcaaagcagggaacatgtcattattctctgtgacagctggtatacgaaacaaaatctggtctgtattgtcaatgaatatccgaacctggatcttattggtaatgcaaggattgattctgttatgtatgaccttgctcctgcacataccggccgcagggggcgtccggctaaacatggaaaacggctttctgttgagactgactttaccttttccggtgaaaaaatcggtgattactataccggtgtccgccgtgtctttaccaggatctttggcaatcaggaagttctggcttatgtcacagccacagaaaaagagcatggtaaaaaacgcctgttttcagtacgatttttccagaagaactgcagattttctgtgcatggcaggaaaaagcaccattgaatcagaccggcagtgactggatgaaatatatcccactgtttttgtactcatttcgctggaatattgagacaagcgactatgagcagaaaacattctggtctttttgcagctatatggtgcggagctgcaaagggattgaaatgctggtcaatctgatcaatatcagctattgtgccatgaaacttttgccgtatcaggataaaactttttctgaatatcgcacaaagagtgtacaggaatttcgttttgaattaagccagggtattcgcagacagatattttttgccactttcgtcaaaaatgtcgaaacacacataaaaacaaatgctgtgaaaaaggctttaaatcggttgattcatcaacaagtctaccatttataaagttgtaaactggtgattaaaaattgatgaaagaaattgtagccatattattttgaaatattattatgggaggtatttacgatgaagaaaattatatcttattttttgagtggaatcgtattatgcacagctcttcttgtaactcctgtatcggcagcagaagttgcaccggcagaagaaacaataactataaattctactgtatcagtgagggctacaaattattggactaagacaacaacaaaattaaattctgtatatgggacagtatcaaatatttcaactgtttcatcagggtctgtaagtggatcaaatcctcagattttaaaaatagaggtgtatagtagggttagttcaggaagtgattcgttttatttatatgtagaagatggcaatggaaatgttaattatacaacagtaagtaagagtggaacaataacaattaatgattttaatggttttgatccgtcaggcaagtggaaaatatggattgttacaaaaggaacagtttcaacatccactgaaacaataaaagtatattatacatattaaaaatgtaatgtggctacaattttgtattataggagagagtgaaatatgaatgtaaatattaacaataaaaatttattttcgcaaagtttgctaataaacaaattcttctttcagaaaaattcttcacacaagcagactgggattacgaccgtagattctgggtgtcaatatagaaataacaattattactataataaagatggtgtaccttttttatcaaaggaacaggcagaccgttgtatcaatggtaaggattggaaaaagatagtgtctgtatcggataaggtgaagtcggatttagaaaaggttgtaaagcaggattttatcagtagcaatggtgcatatataccagaagaaagcaagagacatgatgtaatcaaacagtatttgaatacgattccttctgaacagcgaaattccgcttcgtggacattgagcagaatggctggagattatgcttcaagaatggagacactggtaaagaaaaataatcctggatggaagccgggagatgcatttgatacaagtattttagatcagatggatgatactcttggtggattagattttaaagtatagatgtaggtgagagaaatccaacaggtggcatagttggaaggactctgaataatgaaaggagatatgttaatatggcagttacaggaataggaacttatgcgtcatatacgaatagttatggcaatacacaaaatgctggaaacaaaacgggcaggacatataagaatgcccatgaatataagaactatttaacacaaaaatacgattgtttacgaagcagggattattccgtaaatataaacagttctcttttgtcaaaggctatgggagatgaaaagacaaaacaatggttggagtataatctatctttaataccggaaagtatcgaaaaattgaaagctgctcaaagtgctcgtggctgtaaggtactgagtgtaacggatacaataaatggatatgatagcataacagaagaagtactggtaacagatgaggttgatccgggaacagaaaaagcaaggaaagaacttgaagaaagactcgagaaaaggaaagcagaaaagaaagagacagaggaacggctggaaaaacagcgtgccgaaaaacaggagcaggaagaacggcaatataatctgaaaattgatggaaaagatgtggcagacctaacaggaaaactggtggaattgctgggtacttcaacttctacaggagtgacagaaagcggagtttcgacatttgatgtgctggcatagaaactttgatatgaaaccgtaaggtgtgcaattatctgaataatctggatacgtttttcatgttgttacagacgcattttggaacaaaactgacagagagaaactctcttattatttttgataaggtgcagatgtttccacaggcaagagttgcaataaaatatttagttgctgatggaagatatgattatattgaaacaggatcattgatatttatcagagaaaatgtaaagaacatcgtcataccgtcagaagaaagacatatcaatatgtatccattggattttgaagaatttgcaatagcattagaagaagatttatttctttcacagcatgaaaaaagagtgatattcaaaaagctgcagaatggaagttacgcagaccagtacgaagaaacttttttctggctgtcggattctatgatatccaatgagtgctttttgtgtaatgatccgaatgttggcttatcattgaatgagacaagaagttatgtaaagtgctatatgcgtgataccggacttttggtaagccacgcatttgatgagaatgaattactcgaagatgaagtgtataaacagatattggcaggcaaattgcagattaaagtataagatgtttccgattgaagtaaagtctggaaagcaatataaaacgacctcattaaataatttcagagaaaaatacaaggagcgcataggggaaagttatattattcatccaagaaatttgatcgtgaaagatggaaatatttgtgtcagaaattttcatttgacatttcaaaaaattaaaattataatacccaatgaaacgagtagcagaactgcgtaaatccagtttatgttactcgttttttatataaaaaaagttgccgtttttttgagtgtgtagcgtatcagcgtaagtccagcttatttgatcgctacacattttttttacgcaaaacaaggagaatattatgagtaacaaaatgaaggacatgccggtgaataagctgatgatccagatgggaatcccgatgattttatccatggcattgcaggcggtttacaatattgtagacagtgcctttgcaggaaacagtctgtttctgggcgtgatcatttatctgttctgtttcctgtttggaaaactgttacaggcaaccggacacggacattatcagggagatttatgcgattggactgcgtgatgcgattacaccgatcattgcgttcagctatggaatgcgcagcaaaaaaagaatcagtgatggaattaaatacggattgctgtataccattgcattgatggtcattggaatcgcgatcacagaaattttcccgactgcatttgcaacactctttaatgcaggacagtcgagagcgtattttatcggcgcaatgagaattatatccattagctttttgtttgccggaatcaatgtggcatatcagggcattcccaatcaccgaagtgctatcgtgtgcggttgggtatgtctttttgaaaaaaatttgtaagaacaaggttgatgttttaagttaggagggacaccatgaaaaaaagaattatcgcgatcagcagggaatttggaagtggcggacgttttatcggagaagaaatcgcaaagaaacttggaattgcctatgttgacaaagacattattttacagattgcagaaaagtcagggctgtctccggattacatcaaggagagtggggagctttcaccgagaaaaggactgtttgcctacgctttttccggaagaaatatggcaggaaaatccctcgaagatctcgtttatgaggaacagcagaaagtcattttatcacttgcagagaaagagccgtgtgtgattattggaagaaatgcagattatattttaaaggaacggacagatgtgttaaatgtttttatccatggcaatctgccgcatttatgaggtagataaaaagcgtgtggcagaaatgatgaacgatgttgataaacggcgtgccattcattacaatttttacaccgatcagaaatggggcatggcagataattacgcgattacattaaacagttcggaattaggttatgaactgtgtgaaaagtttatcatcagtgcgttttgcggttgatataattggttttatatttcgaataaatgatcttctggctgctatacaatccatagtagccggagagcatatagctgaatgcaactgcgagcaaaaagtaaggcataccgtcatagccaaacaactcaaagctgatgagcagggcggtgatcgggcagtttgtcacaccacagaacacagccgccattccgacagccgtacacagtgtcggggagatgccaaacagatttccaaacaggcatccaaaagcagcaccggtaaagaaggacggtacgatctcgccacctttaaatccggcaccaagtgttaatgctgtaaagagcattttcataaaaaaggcttccgggcggacagttccgttgatgcactgctcaatgatattgattccggtaccgttataactctggtcaccgacaagcagtgtcaatacaaggacaaaacatccaccggcgaaaatgcgcacataaggatttttgaaaaactttttataaaggtgctcggactggtgcagcatgacacagaaaataatgctgactccggcacacaaaatggcaaggacagatatttcgaaagcgcttgtgatcttaaaggcaggaatgttgtcaatgagaaacatttcctgtgagacaccgaaaaattctgctactgcatgtgcaacgagcgaggaaatcacacacggaaccagtgccgcataatacatgacaccgacactgacaacctccatggaaaagacagccgcagccattggagttccaaacaaagcggagaaagcagcgctcataccgcacatgatcataatgtgtttgtctttttcatcgaatcggaacagttttccaagaccgtttccgatacttccgcctaactgaagcgcagcgccctcacgtccggcagaaccgccgaaaaggtgtgtgatcagtgtggagataaaaattaacggagccatacgtaatggcagatcttcatcggaatgaatcgcggataaaacgaggttcgttccggtatctttttcatcatgaagaagccggtagcatccgacgattaaaagtccgctcaccggaagcagaaaaacaagccacgggtttttggttctggtcagtgtgaccacatacatgccgaaataaaagagtgtgccaacaccgccgacaagcagtcctgagacgatggagaaaagcacccatttggcagaagtctttattcgtttgaaatcatgttgtaatttatgacggatcagttctttcatatgttctttccactttcccttttaatcagaatgaaacggcagtgcccggatttcatttccataatattatagtagcatttcaaaaaatctttttcaatgcaaaacatcattgtattctaatttcataaaataaaagcagcagggcagaaataaatggaaaataagataatataacctttctttgtacaaattacacaaaaaacaaaaacaaaaattatgaaatatagagaagataacaatgaggtattgcttttttatgaaaaaaatatataatcaaattatcaactgaaaacgttaccgaaaacaataccgaaaatgttaccgggaacatttcagcgaaatggcagagtgccagaacaattatagcacaatacagatgtgcagaaagtatacgggaggaaacgacatgaaaagaaaagttttatcagtaatgcttgctacagcaatgacagcaactttatttgcaggatgcggcagtgatgcttccaatgcaaacagtggagatgcagcagcaagttcaacagaagcaggagattcgaaaacagatgcagcagcatccggaagtggttccgtttattatctgaactttaaaccggaacaggatcagcagtggcaggatctggcagcaaaatacacagcagagaccggaacagaggttacagttatcacggctgcagatggtacatatgagcagacattaaaatcagagatggcaaaatcagaagcaccaaccttattccaggtaaacggacctgtaggacttgcaaactggaaagattattgcatggatctttcaggcagtgagttatattcacatctgacaagtgatgattttgtattaaaagatggaaacgcagtacagggtatcgcttatgttatcgagacttacggtatcatttacaataagacaatcttaaatgactactgcacaatggacaacgcagtgatttcttctgttgatgagatcaacaactttgcgacattaaaagcagttgcagatgatatccagtccagattagatgagattaatgagaagtttggatacgatcttcagggagcatttacttccgcaggtatggatggatcatctgactggagatttaaaactcatttggcaaatcttccaatttactatgaatacaaagacaaaggaattgattctacagatgcaatagaaggaacataccttgacaattacaaacagatctgggatttatacattacagattccacttgtgatccgggaatgctctcatctaagacaggtgatgaagcagaatctgaattcggtatggaagaggcagtattctaccagaatggtacatgggagtatggtaacctcacaaatgaagagaatggttatcttgtaaccgctgaagacatgagcatgatgccaatctatattggtgttgagggagaagagaatcagggactctgcacaggttctgagaactactggtgtgtaaacagcaaagcttctgcagaagatcagcaggcaacacttgatttcctgaactgggttatcacatctgacgcaggacgtgaatccatggctcatgaaatgggatttacaacaccatttgatacattcacaggcgaatatgaagcagacaatgtatttatccaggcttctaaccagtacatcgctgatggaaaatactctgtaacatggaacttctctactattccatctgagacatggaaagacggtgtaggttctgcattattagagtacgcacagggaacaggtgactgggacggcgttgtcagtgcattcgttgacggatgggctactgagtatgcagcagctgcaaacaaataaaaagtaatgatgaagtaacatggaaagggtgtgtggcctgccactcaccctttcagattattaaggttttatgagaggatggaaattatggagaaagcaatcaaaaaatattttcctgtttttgcactccctacattagtggcatttacaataggttttatagttccttttattatgggtatctacttatcattctgtgaatttacaaccgttacagatgcaaaatttgtaggattaaaaaattatctgcgcgtgttcagtgatccgacatttatgcatgcattatggttcactgcattgtttaccattgtatccgtgctgacaatcaatgtttttgcatttgtgatcgcgatgcttttaacaaagggaattaagggtactaattttttccgtaccgtattttttatgccaaacctgattggtggtatcgttttaggttatatttggcagattttgctgaatggaatcttaggacactttggaagaacacttacttattcttcctcttacggattctggggactggtcattttgatgaactggcagcaggttggttacatgatgattatttatatcgcaggaatccagaatataccgggtgaactgatcgaggcagcaaaaatggatggagcatccaactggcagttgttaaagagtgtgacgattccgatggtaatgccttctattacaatctgtacgttcctgacactgacgaactctttcaaattatttgaccagaacctggcactgacagcaggagagccgtcgaacaattcccagatgcttgcactcaatatctttgaaacgttctatggcagaaccggttgggaaggtgtcggtcaggcgaaagcagttatcttctttattatagtagcagttatcgcactggcacagaacagactgaccagaacaaaggaggtacagcagtaatggcaaagaaagtaaaagaaaataatgaggtaagtgctgtaagaagatcaaaacacggaggagtgctgaccgtatttttcagtctgctgaccgttttttatctgtatccgatttttctggtgctgatcaattctttcaagaaaaaaggatttatcacaaaaaatgcatttgcactgccggatgagagatcctttaccggattgtcaaatttcatccggggtattgaaaaaacaaacttttttcaggcgtttggctactcggtgctcatcaccgttggctctgttgcagtgatcatcttatgcacctccatgtgtgcatggtatattacaagagtacataataaagtgaatgcaaccatttatatgttatgtctgttttccatgatcgtaccattccagatggtaatgttcaccttgtcaaaactggcaaatatgatgcatctgagcaacccgatcggtattattttagtttacctcggatttggagcaggtctggcggtgtttatgttctgcggatttgtaaagagcatcccaatcgagatcgaggaagcggctatgattgatggctgcacaccgatccagacattttttcaagtggtattcccaatcatgaaaccaactgcgatcaccgttgcaattttacaggcaatgtggatctggaacgattatttacttccttatcttgtattggatatcaaaaaatataagacaatcccgatcgttatccagtacctgaaaggtggatacggagcagtcgactggggtactatgatggcaatgcttgttctcgcaattgtaccgattgttattttttacgtggcttgtcagaaatatattattgaaggagtagttgcaggagcggtcaaaggctgatattatagtaggaactcgtaaaaaaagcgtattttgacaaaaaaacaatttttttacgaaaaaaaacgaaaaaacagtagacaggaaagaaaaatatggttacgataaaggatatagccagggaatcaggatattccataagtacggtttccagagtcctgaatcatagaaatgatgtcagtcccgatgcaaagaaaaaaatcgaagaagtagtagaaaagttccattttgttccgaataataatgcaaagcatttgaagcagagcaacacgaaagcgattggcgtgttagtcaagggtatttccaacatgctgttttctaacattgtggaggagattcagcagatgatcggaaaaaccgattatacactggttgtttcctatattgatgaggatgacaatgaggtggagcaggcgttgcagctctgtagggagcgaaaaccattaggactactctttttaggtggtaatccagaattttttaagcagggatttgcgaaggtggatgtgccgagcgtgctcgtgacaaaccgggcgaatgatcttacgtttgaaaacttatccagcgtggcaacagatgatattgccgccggaaagtgtgcggtagatgcactgtttgaggcagggcatgacaagatcggtattatcggtggtgatccggtaaaatcttacaccagccaccagagatatttaggatgtaaggaaagttttgcacagcatgacagagagatgaaccttgaagtatgttatgagaaagcaaggttctcatttgacagtgcttacagggcaatgaaacgtctggtggaaaagtatccggatctgacagccgtttttgcaatgtcagatgtaatggctatcggcgcgattcgtgcgctgcgcgatatggattatcgtgtaccggaagatatttctgtgattggttttgatggcaccgtattagcagaatattataatccgaagctcgctacgataaaacagcagtatcagacacttgctgtgcggagtgtggagatactgtttgggcagatcgaactgaaaaaggagccgatttatgaagtggttccatttgagttcgcaagtggtgagagtataaagaatttgaaataggagctttaaagctcatttaggaggaattattgttatgagaagcagcggtgttttaatgcacatttcatccctgccatccccttatggaattggtacaatgggaaaagaggcaagaaagttcgtagattttcttgataaatcaggtcagaaatactggcagatccttccaatctgtccgaccagctatggtgattcaccatatcagtcattttccagttttgcaggaaatccttattttatcgatcttgagattttatgcaaagagaagttattgaaaaaagcagaatgtgaagcttttccatggggcagcaatcctcattatgtagattacggtgtcatgtacaattcccgctatgcattattgaaaaaagcatatgtacgttttatgaaaaatcagccggatgattttaaggttttctgcgagaaggaagcagactggttagaggattatgcactttttatggcattaaaagatgcacacggcggaatcgcatggtttgaatgggaaaaagaattaaagacaagagaagagaaagcattgtcagaagcaaaagaaacttatgcagatgacattctgttttacaaaatgctccagtacctgttctttaaacagtggtgggcattgaaggcatatgtaaatgaaaaaggcattgagatcatcggagatgttccaatttatgtcgcaggagattctgcggatgtatgggctaatccggctcagttctacttagatgaaaacttagatccaattgatgtggctggatgtccgccggatgcattctccgcagatggacagctttggggaaatccactgttccgctgggatgagatgaaaaaagacggttatagctggtggacaaaacggatcaaagcaatgtcaaaattatatgatattgtacgtatcgatcatttccgtggatttgattcttactatgcgattcctggaacagacgacacggcacgtaatggtgagtggagagagggtcctggaatggatctgtttcatacattggagaagaagcttggcaagttaaatatcattgtggaggatcttggattcctgacaccttctgtattgaagcttgtaaaagattccggtttcccgggtatgaaagtggtacagtttgcatttgattccagagagggaagtgattatttaccacacaactacccgaaacactgtgttgtatacacaggaacacacgacaatgatacgatccttggctggatgaaaacagcaccgaaggcaagtgtaaaatttgcaaaagagtacttaaacctcacaaaagaggaaggttacaactggggcatgatgcgcggtgcatgggcttccgtcggtgatcttgcaatcgttccaatgcaggatatcattggtgtcggtactgagggacgtatgaatacgccatccaccttaggcggcaactgggagtggagagcaaccgcagaccagattgacaacaaacttgcaaaacgcctttacaagtatatggaaatgtacggacgtgtcagaaaagatgaaaacgaagtcaaagaagcgtaggttatgaaaataaaaaccgcacttacagactggatgttcctgctcgcagagctcgcgaaggaaatccaatctgcaggtgcggtttttattttatctacgttttttcatagcctttttttacctttgttattatagacaattacgaaactcatagacaacgtaattttgacaacctgagtatgagtttcttgttagtgccttgaaaaaaagcccgaaagcgcatataatgaataggctgtggtatatccacggagtacaggagaaaagaaggatttttacatatgctgatagagaagtttttgaaacaggcaagagaagaaattattatggataccgtgttatctgatgagtttatggatagagtgcaggacaattttgcaccgatcgagagccttatggcatattaccgctgtgccattatggaagtggagacaaaattcaatgttttaaatgaacagttttccctccagtatgacagaaatccgatcgaatcaattaagacaagggtaaaatcctttgacagtatattaaagaaggtaaagcgcaagcagattccgttttccttagaatccattgaagaaaatatcaatgacattgcgggagtccgcgttatctgctcgtttcaggaagatatttatatgttagcagactgtctgttacagcaggatgatgtaaggctgatcgagcgcaaggactacatcaagaatccgaagccgggcggataccgcagtctgcatctgatcattgaagtgccaattttcttggaaaatgagaaacgaccgatgaaggtggaagtccagcttcggacgatcgcaatggatttctgggcaagcttagagcacaagttgagatacaaaaagaatattccggaaagcgaggcagagtatctggcaaatgagctggtggaatgtgccaatatcagtgcagcgcttgaccagagaatggaggctatccgtgaccgcatggaggcagcgcaggagaaggaagcggaggaactggagcggcttgaagaaagcaggggattaaggagattttaaaatgggagcaaaagaaaaaaacgggattacggaaggtgtgatctggaaacagcttttaatctttttctttccaattttagtaggcagcttttttcagcagttatataacacggtggattctgtgatcgtcggtcaatttgtaggaaaagaggcgttgtcgagtgtaggtggttctgccggacagatcatcagtcttgttgtcggcttttttacgggattgtcgacaggtgcaacggtcatcatctcccagtattttggcgcagataagaaaaaagagattgaggaatccctgcacacgtcctatgcattttctgtgatcggaggaattttgcttggtgtgcttggaattgcaatggcaccgaaaattttggaatggatgaatacaccacaggaattaatgaaggattctgtagtgtatgtcagagtttattttaccgggctgatctttatttttatttataatatgggagctgctattttaagggcaatcggagattcgaagcgtccattgtattacctgatcgtatgcagttttgtaaatattatattagatctggttctcattattgtattccggttaggcgttttaggcgcagcggtagcaacacttgtggcacaggcggtcagtgcggttctcgttacggtgacattaatgtataagacgaatggaatgaagttatacatttctaagatccggttttatggaaaaatgttgcagagcattttaaaaatcggtttgccggcaggacttgaggctgtcatgtacagtgtttcgaatattatagttcaggtcgcgatcaacaattttggcgttgatactatggcagcctggaccgcgtattctaaaattgattttatcttctggatgatcaacagtgcatttggaattgctatcatgacatttgtaggacaaaattatggtgccggaaaatgggagcgcatccggaaaggtacgaaaatatgtcttggaatggcattggtttcagccgtttcggtgagcattattttaatatctgcggaacatttcttatttggaatctttgtcaatgatgcagaggtaatctcaattggaatccgtatgatgaatgtgatcacaccggcgtatttgttatttgcatttatcgaggtgttttcaggagcactccgcgcacagggcgcggttgttgtttctaccttaatcacaatggttggaatctgtgtactgcgtatgttctgggtaacatttgttgcagcgcatggaacattagaacaggtgatcatctgttatccgatcacatgggcagtgggagcgcttgcaatgagtacctattatctttataagcagagaaagatttttttgtcgctggaagcgtaaaaacttcgtgacagaacaataaggaaagtaaccacatgagcaaaagaaagggctttaaaaagtgattttgcaaatgtggttatttttttattgcataggaaattttttacgacaaattgccttgcaactttttgtaaaaaaataaaaatatagttgacaaatatagtaacggttgataatataaacatatgaacagatattcatatgaataacggaggtgaaaacgattggcaattaatgatgtagagcactgtgaggcgtgtgaaatccacgaagataagattaagcttgtgagcgagcatatgccggatgaggatgaattgtatgatctggcggaattatttaaaatattcggagattcaacacgaatcagaattttgtatgtgctgtttgaatcggaagtatgtgtctgcgatctggcagagatgcttcatatgaaccagtcagccatttcccaccagcttaagatcttaaaacaggcaaagcttgtaacaggcagaagggaaggcaaatccgtgatctattctctggcagatgaccatgtgagaacgatcatcgatcagggaagggaacatattgaagaatagttcccctgaatctgtaacaatatggctgacaggcaggtcagagcataacgaacaaaagtaatttaagatatggaggatatcaattatgaagaaaaaattcaaattacaggatcttgactgtgcaaactgtgcagcaaaaatggaagaatctatcaaaaaaatcccaggtgtcaacgacgcaagtgtaagcttcatgacacagaaaatgagcattgatgcagaagatgacaagtttgatgagattatgaaagaggttgttgctgtttgtgccaaagttgagccggattgcaaaatcttactttagaaacagggctgctgcaatttgcagcagctttttccatatgagagattagaaaacaaggagagagtatgacaaaaaagcagaaaaagatgctttaccgcatcattatcacatttattttatttatagtcttaatggtctgtgaacacacaggaatgtttgacgactggaacaaaatcattttattcgtgatctatcttgttccgtatcttgtcatcggttatgacattgtatacaaggcagcacgcaacatcagtcatggtcaggtgtttgacgaaaactttcttatgatgatcgcaacctttggtgcgtttggcgtgggagagtattctgaggcagtcgcagttatgctgttttatcaggtcggcgagttgttccagggctatgcagttggaaaatcacgccagtcgatttcagatatgatggatatttgtccggaatatgcgaacattgaggaagacggcgtattaaaacaggtggacccggatgatgtggaagtgggaagcattattgttgtaaaacctggagagcgtattcctttagacggtattgtagtggaaggtgaatcgctgatcgatacggctgccttgaccggagaatctgttccaagaagtgcaaaagcaggggatgagatcatcagcggatgcgtcaatggaagcggaaccttaaaagttaagacaacaaaagaatttgacgattccacagttgcaaaaattttggagcttgtagaaaatgcgagcagcaaaaaagcaagggtcgagaacttcattacccgttttgcaaaatactacactccggttgttacgatcggtgcagtgatccttgcaattttgccaccgcttatccttggcggtggatgggctgaatggattcagagagcttgtattttccttgtaatttcttgtccgtgtgcacttgtgatttccgttccacttggatttttcggaggaatcggtgcagcgtctaagattggagtccttgtaaaaggaagtaactatttagaggcagtggcagagatgactacgatcgtttttgataagaccggaacgctgacaaaaggcgagtttaaagtgacagatgttatcaccgagaacggttcgaaagaggaactgatcgagattgcagctttaggagaaggttattcgaaccacccgatcgcaaattcaatccgtgaagcgtatggaaaagaactggatttgaatcgtgtgacaaatacagaagagatcgcaggacacggtattaaggctgtgattgacggccacaccgtgcttctcggaaatgaaaagctgatgaagtcagagagtattttctatacaccttgcaagagcatgggaacggttgtttatgtggctgtcaatggcgtatttgtgggagcggttgtgatctccgatacgatcaaagagggtgcaaaagaagccattcgtgacatgaaacaggttggtgtcagacatacggttatgctgactggtgaccgcagggaagcagcagagacagtggcacagacacttggcattgatgaggttcatgcggaactgctgccaaacggaaaagtggagcaggtcgaggcactgcttcaggcagaaaaagagaaagaacggcttgcatttgtgggagacggaatcaatgatgccccggtacttacaagggcagatatcggaattgccatgggaagcatgggctccgatgctgcaatcgaggcggcagacattgtcttaatggatgatgatgtgacaaagatcgcatccgttgtaaaaattgcgcgaaagacacttcgcattgtaaaacagaacattgtgtttgcgcttgccgtaaaagcactggtactgatccttggtgcgcttggtatggcaaatatgtgggaggcagtgttcgcggatgtaggagtttcggttatcgcaatcttaaattccatgcgtacattaaatgaaaaataatactgaatacaaaaaatgcgggagctgctttgtggctcccgcattttttctgtcataaatacgttacaaagataggttctatttgctttttacagttgtttttcgagtgcagcgaaaagttctttcgcagaagtgaaggtttcactgcttagatctacacatccggctttgatctcaaaaggaagaatctcgttctgaaatacaaggtgctgtgttggaatctcgcggacgagtttctggatgcgagaaacaaaaacttcataggaaagatccttttcagctacaaagaaagaatcttcacttttccggacgagaagcggtgctgtttcgccagtctggaaagtggtgcacaaaagatcataaagaaaacatgcaaccccggtaaccgaaatctgaccatatttttccctgatatcggaaaaatccaaaatacggatgagagaggcattgtaatgtggaagtgttttggctgcctcaaaaatatgtggcagatgttcctccagatagtcttcgttataggcattggtatcctgatctaagaggatacgctggttgagatctgatacaaaccgtacaagctttggcgtgtctgactgaagctgtgcctgtgtgtaggaaaaaggctgtacgacttctaacacataaggcttttcgtcaactaagattggttttacactgatgttaaacacctgatcctgacaggtctcgcattttgacagtgtttcctcatgccgcagtgctcttgcagatgtgcagttgatgcattgcgaggaatagttccagacatcatagcagatatcacatggaactaagtgcatgtcagtgccggaaccggaaaagcccatgattcggcatacagacggatcgacaatgcggacaatggcgaaggtctgctgtaatacatccatttcttgttttatttcttgacaggtatattcttgcatctgattttatctccgattcattgatagattcagcttaacacaaacatggaaataacgctatagacatactgcaaatattgttatattttgtaaaatttacttaaaaatcagttgactttgtaacggtaaaaaagtactatttttgtagagagaaggatggtattgtatggaaatcgaagaagagagtaaaagaggatatttaagtttatcaagagaagagttcgacgagataatccgcctttatgatccatgtatggatgattatttgtatgcttatgacttaaaactggatgagtatcagatctcaccacatgcaagggacaggttccgtctgccttccgaccgtttcagtgatgtggcaagagcacatgagagttttgtggatatgcatgatatgccggcacttgcaaaggaactgcaggagattaaggacggcaaaaagaagtatcacagcatgttttaccgctggctggatacgaacggagaaccggtctggatcaactgccgcggaaaagtgattgatgatgaagaaggaaatccgcattttctgatcggatgcattaacgagatcggagagcggcagaaggcagataatgtgagcggtctgctcggagagacaagcttgtctgcttatgtcagaaagtataaagacaagttcccggacggattttttatgcgtgtcggaatcgatgatcttggagcaatcaatggaaatcttggcaataaatatggtgattttatcatcaaaaaaacagcagactgcctggcagagaatctgaatgagaaacagcagttattccgtattgtcggagatgagtttatgatcgtcgatttttgcggtggaacgctgcaggatgcattacagctttacagtaactgcagaaagagcattgattactttgtcgagcagaatcagtacaaagctgtattcacattgtcagcaggaattttaaaatgcgaggctgtgtatggcggatatgatgcagtactcaagctgacggagtttacgttaaacgaggcaaaggaaaacggcagaaacagttattatgttttttcacaggaagagtatgaccgtttcaagagacgaaagaaaatcgagcggcagttatatgatgcagtcaaccataattttgagggttttgaagcttatttccagccgatcgtggatgcgacgactttccagcttgccggtgcagaggcattgatgcgtttttccatgccgtcagaggaaaaagaaggcgggattgaacgggtttccccggtggaatttatcccattgttagagcagacaggtcttattattccggcaggaaaatggatgcttcagcagtcgatcggagtatgccagaagtggcagaaatggattcctcattttcgtatgaatattaatctgtcgtatgtgcaggtgatgaaaagcaatgcgttagaggaaatcttgaatatcatcagactttacggaattgaagccggaaatgtcggaattgagctgacagagagtggttaccttgattcaaggcacttccagaaattatggaatggtctgaaggaacacggcgtgcaggttatattagatgatttcggaacaggctactcgaatctgcactgcttaggggatcttgaaccgaattatatcaagatcgaccggtcttttacattaaagtcgctgcaaaatgagtatgagcatgcattgatgaaacagatcattgatatgacacacagtctggatcttgctatctgcattgagggaatcgagaccggagatgaacttcaggatcttcgtgcacttggggcagattatatacagggatatttatttggaaaaccatgttcggaaagcgaatttgaagaacattttattcatgtaggagaataaactgatgagaagtattctgaatttgattttcaaagatgtagagaatgaaaatgagacaaaaaaagtggcagtgacactgcggatcagtgcattgctgttctgtgggtattttctttgtcttttgatcgtctttggctgcattggcgactggatgaatgcaggtggatgtctggtgtgcggagtatgttatatgttatctttttacacgacgtattggaaccacacaagagaggcagcgtggatttcacagatacttatgatcgtgtggatcatcctgtttattgtaatgtttggctgggattgcggagtacagcattatctgtttgcatttcttgcactgaactttacggtgagtgctgcaggagaacggaaaaaagtgctgactgcggtcggagcatgtgcactgcgtctggctttgtatgcctacgcccggaattttaaaccatacaatccactggatccaggcataagtgttttgatacagattttaaatactatttttatttttgcgcagatcactgctgtcatgatcatatttacaaaggatgcccagaaaatggagcagaagcttgtacggtataatgcaaaactgcaaaagatcgcttcggttgacgcacttaccggtctttggaaccgccggagcatgtgggaatatatccgtgcagtggagtatgattacgagataggaaatgcaggctttgtatcgatcgctattgcagatattgatttctttaaaaggatcaatgacacctatgggcatgatgcaggtgatgaagtgctgaaagctgtagcaagacttttcatggataaaatgaaaacatgcggaagggtgtgccgctggggaggcgaggagttcctgtttgtattttatggcaaaaacggcgatgcggcatatgatgcgctgcgggagatttataacgagatccacaggctgacggtatcgtatgaaaatgaggagatccgcattaccgtgacgtttggactggaagagtacgataagaacgatggtatggaagctgcgatccgcagggcagatgagaagttatatcagggaaaagagtccggacgcgataagatcgtttattgacggaacatatcagaaaaaatggtggtcatcagaaaaaaattgcaaatatagtggaaataatatagaattattttggaacaagcggtataatcagatatgctatgaaaaggcttacagtataacacgagaggagttaacgggaagaaatggaagagaatgaatatcggtataatgacgtttccgagagactgcggagaatgaataagatgtatgtgggtgccacagtttttatgtgtgtactgattttaatgtatctgtggatgaaactgatgaatcataacatccagtcaatgacggtatatggcaatatggttcttttatttttatttacagtggtgaatacggtcatttattgcagggataaggcaaccgacaaattaaaagtagcagcaaccatagagatgggcattgaatatctgcttcttggggtgcagacagatgcaaagtttattacctatgtgctggtcgcatgtattgcattgcagcttccttattatgataaaaaaggattaaaactcacagagatcgggcttagtattttatacataatcgtgaccatcgtacaggcacttaagggatacattgtgatagatgtggatacgatctgcagtatctggggagtccttggaatcctctttatcatcagcagagtcggatatatcacaattatatttaatgatgatgcgcttggttcgatcgcagcagagcatgagaaggaaaaacacattttggacggtgtactcagtatttcacaatctatccagacagaatctgtaaagagcagtgaactgattgaaaaactggttggcgtgacagaatccgtgacaaacagcatgcaggagatatctgcatcttcgaatacaactgcaaacagtattgaggaacagaatacaatgaccaattctattcaggatgcgatcggagtgactggcgaaagctcgaagcagatggtagacattgccatgaattcgaatgagagcattcaggaaaatatccgtgtcatggaagaattaaagaatcagtctgaactgatcacaaatacaaaccatgaagttaccggtgcgatgacaaagcttcagaataagacaaaagaagtggaagagatcgcaggaatgatcttaaatatttccagtcagaccaatctgctggcgttaaatgcttctattgaaagtgcgagagccggagaggcaggacgtggatttgcggttgttgcagagcagattcgtcagcttgcggagcagacgaagaactctacggaggagatcacgagaatcgtcaacgagttaaatgagaatgcaaatgaggttgtttcttctgtggaagaatctgtagaggccgttgagagccagaatgagaagatccttgcggcatctgaaacatttgaatccttaaaccgcaatatgacagatctgatcaatcatattgaggaagtgaaccgtcaggtagacggactctcagagtcgaacaataagatcgtggagaatatttcacatctttctgctgcaacggaggaagttactgcaagtgcagaacaggtacacggaatgagtgagcagaatcttgagtatgcagagcaggtacagcaggcagttgataagatgcgtgccaccgctgatgatttgaaaaaatacttataaaaaaagagctgcaacagcagccccttatagaaaagaaaaatgttccagagcgaaggcgataccgtcttcgctcgctttttttgtgacaaaagaaacctgatcaaaaagagaaaccgggtttgcattccccatagcaacgctgtttggaagataggagagcatcggaagatcattgttgctgtcgccgaaggcataggcattttcttttgtgaggttgtaatggtctaagacaaattgtattccagttgctttgctgtagccgagtggaacaaattcccggaatgtgccgccccggtcaatgcagttgaaatgtacgtcgctgacctttcggaaagcctgcagctgctctttttcctgaaaccagataacaaatttatcgcagataaaatccggtgactcaagatccgttggcattgtataaccgcgtttcacgaacgcatcatattgtgccacggcatccggatgcatgaccggacggacaggatcgtaagcaaccgcagtggatgattcgaaaacaatgtccacattggtgtctcttgcagcctttaacagttccattgtgatttcatgggactgtgtgacatgtaaaagattcttaccgccgcagtaaatatcagtgccgcatccgcagacaaatccatcaaagccgacttcctgaaagcgtggttccacgttctggatacatcttccggtatttaaaaacatcaggtttccgtttgctctggcttttcgtatcgcagtgatggcactctgtggtatggaaccgtcgatttcggaagttaaagttccgtctatatcaaaaaaagctattttacgcattttagattctccatttcctgtatcattctgaaacgattgcattgtatattattttgcaggattagtcaaagaaaatatgaaaatagaaaattctgataccataagcatgaaaaatatgatagaatatgtataactttgatgaacacggaggtttctgataattatggaacaggataacagaaaagtggcttgggggaaagccttaaaaccgatatttgcattaatgcttgtcattgttttgtggcaggtgctcgtgttggaactgttaaagaatggaatcatcagcacgttgatcgcagttgtgctggtaagtgcggtcagcgttgtgatttttggaatcgtattctgggttgtgaaatcactgctgaaccagtttcttaccatagcccagggaaaagcagaagatgaacaggaacagacgaagatcggagaaaaagcgaaaaagctgatggagcgtgaggatgacatcggagcgatgatgcgttccgtacatgattccatcagttcatttgcaatggtgatttccggtatcaaaacagcaacagaagaattaaaatctgtatctgatgattttaataatatctttcatgatatggaagattccttgaagatcacacaggattcgacacatacgatcgcagataatactgtgacgcaggcagcacagacggcagatatgaaagagaagatcgatgcgatcggcgatctgatcgctatgatttccgagaatgtcgatgccttgaatgcaagtgcagataagatgcaggagtgtaatgagtctgctgaaaatatcatggctgaactgatcgatatcagtaagaagaatggggaagcaatcgacaatgtaagagagcagtctaagctcactaatgattctgcacagcagatccagactgtaacagacattatcgcagatatttccagccagacgaatctgcttgcgttaaatgcaagtatcgaggcggcaagagccggagaacatggaaagggatttgcggttgttgcagagcagatccgtactttggcagatcagtccagagaatctacggaacgtattaaccagctggtagcagaccttatggataaggcaaatgtgagcgtggagatcactgagaaggtatccgaggcagtcagcctccagaatgagaagatcaatcagacaaaggaaatctttacaacattaaacggtgagatcggtcaggtcggaagtgcgattgaaggcatcagctctgaggtggaagaattaaagaaccacagtgatatcattgagacggagacggtttccctgaaagaatttgcagatcagaatgcggagagtgcacagatcacgattgaacatatgaatgagttagacaccacagtagatcagtgcaatgcagctacagaacgtgtagtcggagtatctgataagctgatcggttatgtgcgggaaacagagaatcgcaagaatatattatccatgaaataattggaaaataaaattatgttgtaaaaacaacagaaaatgaaaagcatttttattacaatctgtacatacctcgtaacaagcgctggtgtgcaggggtataacctctgcatagcagcgttttaaatttcataaaaaggagaatttacaaaatggaacagaaaatgttttgttttcagtgtgaacagactgctggatgcagtggatgtacaggaaatgcaggtgtgtgtggcaaatctgcaaatacagcaaaattacaggacgagctgaccggagcattgatcggtcttgcaaaatcctgcggaaataatccaaagacggaaaacacagaccgtatgataatagaaggtttatttacaacgatcacaaatgtcaattttaatgatgaaacattaaaagagatgatcgagaaagtaaaagccgagaaaaataaaatcgtgccggactgcagtgtctgccagaatccatgcggcaataccgatgattatgacatgaacagcctttggaacgacaatgaagatatccgttctttaaaatccctgattttattcggaattcgtggaatggcagcatatgcatatcacgcaatggtgttaggctatacgtcagaggaagtaaatagtttcttttatcgagcactgtctgtaatcggctacgatatggatatggaacttctgcttccgatagtgttagaagtaggtgagaaaaatctgatctgtatggaattattagacagggcaaatacagagacatttggcactccggtgccgacgactgttccgctgacagtggaaaaaggaccgtttatcgtgatcaccgggcatgatctttatgatctgaaattattgctggagcagacaaaagataagggaatcaatatttatacccacggggaaatgcttccggcacacgcatatccggaactgaaaaagtatccgcatttaaaaggaaacttcggaaccgcatggcagaaccagcagaaagaatttgatgcgctccctgcaccgattctctacacaaccaactgcctgatgccggtaaaaccaagctacgcagaccgcgtatttaccacagaagtagtttcttatccggaaatggttcatatcggggaagaaaaagattttacaccggtcattgagaaagcattagagctcggcggttatgactctgaccgggaaatgacaggaatcaatggtggtaagacagttatgacaggtttcggacacggaacggtgttaggtgttgcagaccaggtgatcgatgctgtaaaatcaggtgctatccgtcatttcttcttagttggcggctgtgacggggcaagagtgggaagaaactattatactgaatttgtaaagcagacacctaaggattctgttatcctgacacttgcctgcggaaaataccgtttcaatgaccttgatcttggcacgatcggcggacttccaagaatcatggacatgggacagtgcaacgatgcttacagtgcaatcaaagttgcagttgcacttgcagaagcttttgagtgcagtgtgaacgaactcccgctttctatggtgctgtcctggtatgagcagaaggcagtctgcattttactgacattgctgcatcttggtattaagaacatctatcttggaccaacattgccggcatttatctcaccgaatattttaaattatctggtggaaaattatcagatttcaccgatcagtacgccggaagaagacttgaaaaaaatacttggctgatttgcaatctggctatttgtattaggacatagagtgtgctagaataaggctgttgcacggaaacgtgcggcagccttatttctttgctgtataggaaattgcaaagaagtttttacgatagaaaaagtctggggaattagtatgacaaaagatctgacacagggaaaaatcaccccgttacttgtaaaatttacgataccgcttttatttggaaatatttttcagcttatgtacaactcagtagacagcattatcgtcggacagcttgttggaaaagaagcattggcggcggttggtacgagcaatccgctcatgacgctcgccattttatttgtgaatggaatgtgcattggcgcttctatcttaatgggaacgcagtatggcgcaaagaaaatggacgtgctaaaacggcagatcagtacgaccatgatcgcaggaatcgtgttttccgttgcgatcacgctgttttgtattcttttcgcaaagccactcttaatgctgatacaggtgcaggaggaggtattgccacttgcagtttcttatttgcggattgtatttcttggatttatttttacatttatctataatttctttgcctgcacactgcgggcattgggcgacagcacgacaccactgtattttctggtggcaagttctgtgctgaatattatcggagatctgttttttgtggcagtgcttggctggggaagcatgggctgcgcgatcgcaacggtcgtcagtgaggcaatgtgctgtctgctatgcactgtttatattaagaaaaaagtaccggagttaaatcttggaaaagcatggtttgtatttgataaaaacctgttgaagcagacaattctttatggctggacgagtgcaatgcagcagggaaccgtgcagcttggaaaaatcggggtacaggcaatcgccaacacaatgggagtttcggtcatggcagcttatacgatcgtgaaccggatcgatgattttgcctgtctgccggagcagaatattgcacattccatgacgtcttttatggcgcagaacagtggtgccggaaaaaaagaacgtgtgcgcaggggattcttaggaggcatgaagattgaacttgtctatggatttgtgatttttctggtgtgtttcttcttcgcagagccgatcgtgcgcctgtttgtcaatgatgcagacgttgtgaaagagggtgtcacttacttgaagctgatttcttttatgtatctgcttccggcagtgacgaatgggattcagggatatttccgtggaatcggggatctgaagatcacactgatcagcagtatggtaaatatgggagtgcgcgtgctttccgcttttgtgtttgtgtttgtgttcgtgttcgcaatgaaggtcgagacattcccgtttgcatgtctggcaggctggatcgccatgctgcttacggaagtgcctcttttagtgcgcagttatgggcgtctgaggcgcggagagaatgctgtgatctagaaggatatacaagatattggacatgaatggcagggaaaaaatgatggaagaaaacagggcagaacaattgctttttttatgggaaaaaatttcagaagatgcggtgcggctgcttcgggtattcggagaacagccggtcgtgacagtgccgggatttatcgagggaagatgcgtgcgggaattgggagactattgcttttcaagaagaaagcttccggagaatgaaatccggtattcaaggtactgcggaggtatgtgggagagtggtctgtttgcgttgaatgacaaagtgaaaaaggatcgtattgtctcagagcaggaatatatggatgaaaatattatttctttggaaacaatagaatgggatggaaaattgcacgaattatcagaaaaatgcatcaaagaggtacaacttccatcgggtttggagaaaataggaagctgtgcattttataactgcacggaaatggagcggatcacagtatatccgaaactgaccgaggtgggaagtgatgcgtttatgaactgtctgaaactgcgtcatgtacagatgtgtgcagaggtagaggagaaaaccggcttaaaacagcttttggcgcagattaaatggcaggtggaggtttcttttgaaaagacggaaggaacgaaacaggcagtacttttgtatccggaatattatgaaagctatgatgagatcggaccggcgcatatttttgaattaaatctgaccggagagggctttcgtgcaagacagtgctttaaagagggggttgtccttttacaggcatatgatgagattttcccacaggcgtgtgtggaagaaggcgcggaagtgctgattccgatggcgtggaacaggttatattatgcaatgggacttttgccggaagcgaaggcggtttatgaggcttatgtgcgtgaacaggcggagaaaatactggaacttttgataaaacagagggaattaaagcagctttccttcttttttgaaaggggatacggaacgaaagagcagatggatttggcagttttcagggcatcagcaacggagtggatggaaggcgtcgcaagcctaattgcgtggagaaggaagctttttgcagaacagacaaataccgtagacgtaaaaagccggtattcattcgatgatttttaaagcaacggaaaggagcgggaatggagcagtttaggagcaaacatatacagacacagagcgagtgggaaacacagatgtcgaaaaaggtactggagtttgtgcgaagcgagctttatatggatctgcgtttcttggatattgcgctcggagcacttacctatcaggcggatgaaaacatccacagctttgcaacggacggcatgtacctttatttttcgacggagcaggtgctaagagtgtttcaggacaatccgaaatatttagaccgggcgtatctgcacagtgtgctgcactgcatcttttttcatctgtggatcggtgggaaaagagatcgggaaaaatggaatcttgcctgtgacattgccgtggaatacacgatcgatcagatgaacaagccgtgtaccagaaggattttaagctggcagagacagaagctgtatggggagttaaaacagcagaagcagggaatctcagcggcagtgatttatcgttatctttgtggaagaaagccggaggagctgctgacgttacaaaaggaattttatacagatgatcaccgttactggccgaaagaggaacagaaaaatgcggcaaatgaggatgccagaaaacagtgggataaaatcgcaaggcagacgcgcatggaaaaagagtccagaggcgatgagacggaggacggagaggaagcctttgccgcccagctaaaggcagagaagggaaaacgcagttatgcggaatttcttcggaaattttccgttttaagagaagaaatacatgcagatccggatgaatttgacctgaattattatacttatggtctgcggctttatggaaatatgccgctgatcgagccggttgagagccgggaagtaatgaaaatccaggagtttgtcattgtggtcgacaccagttattccacaagcggagagctgatcaaaaatttcctgaaagagacgtatacgattctcacagagcgaaacagcttttttgcgcagagccgtatccggatcattcagtgtgacaatcaggtgcgcacggatgaggaggtaagaagcagtcaggagctagaacagttgttaaaccgttttacgattgtaggcggtggcggaacggatttcagaccggcatttgcttatgtgaatgagctgatcgagcagggcattttaaaaaatctgggaggcctgctctattttacagatggaaagggtgtttacccgaggaaacgcccggattataaaacagcatttttatttctggaagattatgatgagagtgcagttccaccgtgggcgatgaagcttcggattgaacagacggattttgctttagattaggaggatttatgaacattaaacaggcgaaagaagagataaaacacacagtgcaggcgtatttgagcaaggatgcgtttggcgtttataaaattccggcgatccggcagcgcccgatgcttttgatcggaccaccgggaatcggaaagacacagattatggaacagatcgcaagggagtgtgagatcgggctggtggcttatacgatcacgcaccacacaagacagagtgcggtcggtcttccttttatcaaagaggaggaatatggcggaaaaacatatgctgtgacggaatatacgatgagtgagattattgcgagtgtctaccggaaaatggaggagagcggcagaaaagagggaatcttatttatcgatgagatcaactgtgtgtccgagacgctggctccgactatgttacagtttttgcagtgtaaaacctttggcaatcaggcgattccggagggctggatcattgttgcagccggaaatccaccggaatacaataaatcagtccgggattttgatatggtaaccttagaccgtgtgcgctgcatgaacattgaagcggatcttggcgtatggaaggaatatgcgcgggaaaaacatttaaacagtgctatcttaagttatctggagcttcgcccgaacaatttttaccgcgtggaggcggatgtggacggcttacagtttgtgactgccagaggctgggaagatctgagcaatctcatggatgtttatgaagagcttcagattccggtggacgaggagacgattcatgagtttttacgtcacgaagatgtggcagaggatgtgtcggcttattttgatctgtataaaaaatatcaggatgactatggcatcgcagacatattggaaggaaaagtaaaaccgtctgtctatgcgcgcattgatcaggcggcgtttgatgaaagactttccgtggtcaatctgttgctgagtggtgtgtcaaatgtgttttaccggattcaaaaagagcgtgaaattagcgacgcatggtattcttttttgaaggaataccgtcagaaattaaaagattccgagaaaaaagaaggcgtttttgcatcaattcttgcagaaaaaacagcgatagatgaacaaaacgagagacagcagtttgtgacaaaatcgcagagtgaatgtgcgcgcagtctgaatgaaaaattaaaagaaagcgcgggaaaaattgctgcagaggaatctattaatatagaagaaacagcgttattcgtcctggcaaaagttccgtttgacgcacagtgcgaaatgctgcaagaccttgaaaatcaaggcgtacaggtgttggaaaatgcattttcatttatggaacaggtattttccaacgggcaggaaatggttgtgtttgtgacagaacttacgatcacaccggagattgcagttttcttaagtgagcatccgatcgaacgctatgaaatgtacaaaaatcagcttctgatcgggacaaaacgtgcagaaattttatccgagattagaagagactaagcgatttcccatgtttttccagaaaaaattaatggaaattgcataaaaagaagcagaaaagagcagaataattgtaatatctgactgtttctgctttagcgcaaaaaagttataactggctcgttagtagattattgacacaaatgtaaaaaagaatctggtaaaaatcgaagaaatttttccagtgaagttcctgaatgagaaatttgacttttgggaataattgagtatgatagagatttgtaatgaagcggcagataaatttttagtttatctgtcgttttactatgttatgtatcattcttgaggaaaggagaaaaatgagaaaaaaaatattggacgcagcattactttttacattcacgttatgcttgattgttacgtccaacattccggaagaggtaactccgattgctgagaatccgggtgatgtggtttcacttgaggatcagaaagcagagccagaagaattacagcttatggctggtgtggcagttgcaatttccgcaaattcatttaccacagaatcagatgaagaaacaggtgttgaaaagaaagatgttgttttagtgacaacttcgaatgattcagaaagtaatttagaagaagagacaggcgaaatagttgaaacaaatacagaagtaagtgagaatgatcaggtggaggaagttcttggaacttcggaaagtacagtgtataacaaccgctggaacatcagcctgaccgaagatgaagtcgatctgctcgccaaaatcgtatggctggaagcaaacggcgaacctgtcgaggggcaggaagcggttgtcgaggtggttttaaaccgcatggcatccgatttgtatccagatacattatatgatgtgctgagccagaacaatccggttcagtttgtttcctggaaaagacgggataaagcgcatccgacagagacagaataccagtctatttataatgtattaaatggaaatacagacctattaagaaatgatacaatgaatttttcaacttatccgctgacgtcgaatcttgatgtaaaaatctgctgtcattatttctgctactaataaagtaccagatcatgacgcggccagcaaaagggatagtacatggataatttccgtgtgctgtcccttttctggttaggcgaagtgtgataaaatatataagtgattcaatatcaggacaatacacacatgaatcatttttcagtacagtaaattgcaaattgtaaaactcaacacagtgtaaatatattgtgaaaaattaatccgcgcataaaagacactggggagccgccggttcttagaaagcagtggctgtatttcgttctgatttatcagataagaaatgcagccggtggtttcttagtaccgttgcgagcgacacgtagcggaagcgggtctctttatgcacggattaattttgaacaatttaaagacagtatagatgaattttacaattcgattcacaacttaaggaaaaaaataatcatgaaacaaatcatagcaggaattttagcacatgtggacgccggcaagaccacattgtcagaagcacttttatatagtagtggaagtatcaaaaaaataggacgcgtcgacaacggagatgcgtttttagacacagatgccatggagaaaaaacgcgggatcactatattttccaaacaggcggttctaagctttggcgacactgacatgacattgctggatacacccggacatgtggatttttccgcagaaatggaacgcactttaatggtgctcgattatgcggtgttagtaatcagtgcagcagacggtatccagggacatacacagacactctggcggctgttaaggcggtacgagatcccggtatttctttttatcaataaaatggatcagccgggagcagacaaagaggcaattctttcggaactgaaaaggcagttgtccgacggatgcattgatttcacaggacttgttcaggcgaaaaaagaggcaggaactgacaaagaagcagataaaaaaatagacaagggagcggatgaggcagcccatgcggttatggaagagatcgccatggaagatgagactgccatggaagcatttttggaaaacggaaaacttgaggatgagaagatccgggaaatgatcatagagcgtaagatttttccatgcttttttggttcggcacttcgcaacactggggtagatgcatttttacagggatttgaccattatacgttagcaccggaatatccggatgaatttggcatgaaggtttttaagatcgcaagagatgaggcgaataaccgcctgacgtatctgaaagtgaccggaggaactttaaaagtaaaggcgcttctttcgaatgaaggccatatgcggtttggcgaggaacgctgggagcagaaggtgaatcagatccgcatttattccggaacaaaatatgagaccgtcagtgaggcaaaggcaggaatggtctgcgctgttaccggattagactacacgtatccgggacagggatttggaatcgaagcgcaggcagacacgccggtgcttgaaccggtgctgcattttgccctgatacttccggaggaagttgaaccggcggtgatgctgccaaaactccgccagatcgaggaggaggaaccggaattacatattgtatggaatgaaaagcttcaggaaatccagatccagatcatgggagaggtgcagactgagattttaaaaaacatgatcgcagaacggtttggagtggatgtagaatttggtccgggaaaaattgtatacaaggaaacaattgcagataccgtggaaggcgtgggacattttgagccactgcgtcattatgcggaagtacatctgttattagaaccgttagagccgggcagcggcattgtgatagagacagactgcagtgaggatgtgcttgataagaactggcagcggctgatcgtaacgcacttaaaggagcgggaacacattggtgtgctgacaggttctgtgatcacggacatgaagatcactgtgatcggtggcagggcgcacacgaagcacaccgagggcggagatttccggcaggcaacttaccgtgcagtgcggcagggattaaaacaggcacagtctgtgctgttggaaccatactatgaatttcatatagcagtgccacagagtatgatcgggcgcgcgatgaccgatattgaaaagatgcacggaaagtttgagggaccttatcaggaaggggacgcacaggtgctgcgcgggatcgcgccggtctcatgcatggcgaactaccagaaagaggtcacagcatatacgaaaggtcttggaaaagtaacgtttcagtttgcaggttactatcgatgtcataatacggaggaagtgatcgcgcagatcggttatgattcggagcgggatcttgtacatccgaccggatcggtattctgtgcacacggagcaggatttatagttccgtggaatgaagtgccggattatatgcatgtggagggcagactgctgcagaagaaagagcaggaagaagaaatccacacgacaggaaagaaccgtacttacgatcaggatcactggatcgatattgaggagattgacgcaattttagcacgcacctatcatgcgaataagcatgagaaaggagcaacgaagcagtggcgcaccacgaaaaaagtgatcacatccgaccagacttcgcgttacgttccgcctaagacagtttcgaaagaggaatatctgctggtggacggttataatattatttttgcatgggagagtttgaaagagctggcagcgtctaatattgacggtgcaagaggaaggcttttagatattttatgcaactatcagggaatcagaaaatgcaatctgatcgtagtgtttgatgcttaccgtgtaaaaggacatcagacggaaatgtctgactatcataatattcatgtggtctatacaaaagaggcagagactgccgacgcttatattgaaaagtttgcacatgaaaatggaagaaagtaccgggtgacggtggcaacctcggatggacttgagcagatcatcattaccggacagggctgtcatctgatttccgcaagggagtttgaaaaggaagtggagacagcgagccacgcgatccgggaaagaatcgaagagagcagggaaaaatcttccaaccgcttactgggagaggcaattgaaaaactgaccaacccaaaatgatgaaagacggaatacaaagaaatgcaggaaaatataaaaaccgaaaaatgaaaaattcaggagtaagaataaaatgttaccagaacaattttgtgaacgaatgaaagaaatgctaggagcagaatatgcagatttttttgcaagctacgatctgccaaaatatcaggcgctcagaatcaatccgttaaagacaacgagggagaattttttaaatcaggcaccgttttccttagaggaagtgccgtggacagcaaacggatactattacagtgagaatgaccagccgggaaaacatccgtatcatgaggcaggtgtttactatattcaggagccaagcgcaatggcaccagcagaatatcttatggcagaaccgggagagcgtgtgttagatctctgcgccgcaccgggaggaaagagtacgcagatcgcctgcgccatgcagggcgaggggcttatcgtctgcaacgagattcatccggcaagagtgaaaatcttatcggaaaatatcgagcgcatgggcgtgagcaacgcgcttgtgaccaatgaaacaccacagagacttgcagagaatttcagggagtactttgaccgtattttagtggatgcaccatgttccggcgaggggatgttccgtaagaatgaggatgcctgtgacgagtggagccctgaaaatgtggaaaattgtgccacaaggcaggcagagatcttagactgtgcagcggagatgttaaagccgggtggaagattggtgtattcgacctgcacatttgcaccggcagagaatgagggcagcatcagcagatttatagagcgtcatccggaatttgaaattttgccggtggagaaaaaagcgggcatgatgcccggcgtgggagcgtggaccgatcatccggcgaaaggcatcgagcatacgatccgtctgtggccgcatcatttaaaaggggaaggacattaccttgcggtgctgcaaaaagcgggcgttttgtcaaaatcctatcaggggtattgcagaaacggtgtggaaaaaagtatttccgaaaaagagtgcaaagaatttttggcatttgcagaggaaacacttgtgaaaaaaataacaggcgattatttaaaattcggcgatcagctttaccggatgccggaagcaatgccgtcgattcataaattaaaagtgcttcgtccgggactgcatcttggaacaatgaagaagaaccgctttgagccttcccatgcattagcgcttgcgttaagaccggaggatgtaaagcatgtgtgcagcctgacaggtgacagcccacaggtgaaggcatatctgaacgggcagacatttaacttagagggagagaaaggctggtatttagtcacagtcgacggctacagcattggctggggtaagttagcgggtggtattttgaaaaatcattatccgaagggacttcgtaaaaatggttaaggaaaaaacaggaaaaaatctgaatctgacggaaggcagtccgttaaaattaattttgttatttgcaatcccggtctttttgggaagactgtttcagatgatgtacagtctgatcgacacgaagatcgttggaagcattttaggagagcaggcactggcagctgtcggttccgtgtcaatcctttataatctgctgaccggtattttcagtggattcacattgggattttccattgtgatcgcacagaacttcggaagtggaaacaaaaagcttttaaagaaaaatgaagcgtcctcgattttacttggcatgataacggcggtcgtcattgtttttgcagtattactgttcttaaatccgatcctgcatctgatgaatgttccaaaggaacagtttgcaatggcgcatgattatatccggatcttagtgtggggaatgtttatcacactcgcctacaacctgtgtgcggacatgcttcgggcaatcggggattctgtgacaccgttgatttttctgatcgtggcaacagttacgaacattgcgctggattatctttttatcggcggctgtgctatgggcgtggcaggagctgcctatgcaacggtactgtcgcagctgatctccgcagtgctatgttttttgcgcatcagatccggtttcccaattttacatattgcaaaagaggatttcgaatgggataaggcgcgcatgaaagtgttatatcagaacggacttgcaatggcgcttatgtcttcactggtaaactgtgggaccttgattttacagacagggatcaatacactcggaacaaatattatcgtggcacatacggcggcgagaaaagtatttgagattttcagccttccggtcagtgtgttcggtgcatctatggcaacttactgtggtcagaattacggcgccggaaagtatgacaggattcgtcagggcttaaaggcggtgaccgggatcggctgtgtgttcagtgtgatcatttttattttgtcgcatacaatatctccgtatctgatctcttttatcgcaagttctgacaacgaggaggtcatttactggggaacgcagtatcttgtgtatgatatgtcgtttcaggttgtctgcgtatttatcgtgatcctgcgcaattccttacagggaatcggagatcagcggacacctgttttttcgagttttatcgaaatggctggaaaagtggtgttcacacttgtttttgtgcggatattcggttactgggcggtcatctggacggagcctgtcatctggatctgcatggtcattccgctgatcgtgaccgcagtgagaaacccggtattatttggcaaagaaaagtaggagtatgctatgagattatggatgtggggcgctggaatggcggttctttacggagtgctgtttctgtggtttatctgtcaggtgagaaagccggattataaaaaacattatgtgttcaccaagacggtgcagagcgcggcatttctgctggtgtttttagtggcagcaggcgtcagtggggatatgcgaaatctctggcggatgctgccggcgtttgtgtgctgttttgccggagatgtgcttcttgccttttacaataaagtacgggaaaagaagatttttctttccgggcttgtcgcatttttgctcggacatttgttttttatccgctggttaaaccggatgcagtcaattactattacagatgtagtgataccagcaatggcggtgctgctcatgttttttgtgacaggaatgggatgctttcatacaggaaggctcagaccgtgtattctggtctacagctttttcattgcatacctgtttgccaaaagtatgcatattgcgctttgcctgccagactggtatcatagcgtttgtgcagtgggaagttttctgtttatgatttctgatatttcgatcctgtttctttatttttataaaaacaggaatcgcaggattcatctttttaatctgaccacttattatatgggaatttttttgctggcagtcagtccactgttttattaagcggggcagaacgcttgtcgaaaaatgtaatatcatgtatagaaggcgtgtaagaatgctcgtttttgtaaaaatttgcaaaaaacttctttttttctctgaaaattatgtataatagctagagcgatagtttacacattacggaaactaggaaggtacagatcggacatggaaaaaaggctgacaatgctcatagtggatgatatggagataaaccgcgcatcttttgcggagatcttcaaagaggagtatcatattttagaggcagaaaacggaaaacaggcgttagagcagatagaacaacaaaaagtacacattgtgcttttggatctctgcatgccggtgatgaatggctttgaggtcttgcaggagctgaaacagcagaagaagtttgcaggaatcccggtcgttgcgaagactgccattgatgaaaattcggaagtgcgggcattagagcttggtgcggatgattacatttttgtgccgtgtgattcggcaatcataaaaaagagagtgcataatctcgttgaaaaatatattctggaaagagaaaaaatccaggcgcagttagaaaaagagcaggagatgagccgtgccaaggaattgtttttggcaagaatgtcccatgaattaagaacaccgatcaatggaatcatgggaatcacgcagcttgcacattacaaagatgctgcggtgcaggaggatttcaagaagatccgttcgcaggcagaatatctccagacacttgtaaatgatgtgctggatatggcagcgatcgacaatgataagatgacgctgcacacaaaactgttttctttgaatgatgttgtgtcggaagtatccaatcttttttactctcagtgcagacagaaaaaaatccggttttatttccgggttgatcgtgtgacacatgaatatctggtgggagatgatgtccgtgtgaagcaggtgctcgtcaatctgctctccaatgcgtttaagttcacggagaaaaacggtgtgatcgaagtgtgcatgtttgagcaggatgtggacgataagaacactattttgcatatcacagtgcaggacacaggctgtggaatttcggaaaaggtactggaaaaaatctggcagccatttgaacaggaacagcatgagaatggaaaaaattatggtggcagcggtcttggacttccaatcacaaagagtattgtggaacaaatggaaggtaaaatcgaggtgatctctgaatacaatgtcggaacgaagtttctggtggaacttccgtttgaaatcggcaggcgtgttgtgcgggaaaaacgcaagtttaaatccttaaaagcatttctggtcaataatgatgagatcacgctgaattatatgaaggcaacgctcgcaagacttggaatccgttatgacagttctatgagtgagacggagattttaagcacgctcaaagatgcttatgaccgtggagagggctacgatatctgctttgtatactggcagatgccaaatggctacggcaggagcctgatcgaaaagatccggaagctattcgaccacgatacgttaaaaatcattgcgtcctcttataatgcaaaagattttgaggatgagatgcgtgaggctggtgcggactatattttgacaaaaccggttttacagtcgcaggtttacagcctgatctcagagatctgccgtgcaccggagacggaaacttgcaatctggaaacatatgatttctcagggaaaagagcacttttagctgaggataatgcagtgaatgcagaggtgttccagggatttttgaaagcggttcacatggaaacagagtgtgtggataatggtgaggcggcactcgaacgctaccagagcatgccggactattattatgatatgatttttatggatcttaatatgccaatcatggatggctatgaggcaacgaggaaaatccgtgacagcaaaaagccagatgcacaggatattccgatactggcggtgacggcaaatgttctggcaaaagatgttgtcagggtgcatgaggctggcatgaatgagcggatcataaagccggtcaaaagagaacagctttatcagaccatggaaaaatatatttgacatagagcggatgaatcaatataatatagaacgttaaaaagatgtgagatatcatgtgaatcataaactcacatctttttctatgttttgggaaatacttgtacagaaaatggaggaactgtgatgcagaaaatctgggtgtgcggtgcccgtggtcagataggccaggcaatcaatgatgttgtagataaactggaatttatataattattcctctaactttccccattttataggctttcccgcctgtccattagtgaaatgatatgtagtttcccttatttttgcccttatgagataatcacaagggaaataagggaaattttttagtcattgcccaccactttatcaagaagccgaactgattttcgtttcgcatctcttgtggagtgagcatagacgttcattgtggtactgacatctgagtgtcccaacaattcctgcacatcttttggggcagctccatttgctaaaaggttgcttgtataggtgtgacgtaactggtggaaatgaaagccttcaaa

SEQ ID NO: 14326 - DNA, 2915 bp, Unknown
  gut microbiota DNA sequence
ggttgtagacactgttatcataataacagcaatggatagctgctttgttatgttaataccgagacataacagagagaacatcgaaaaatggttgacaggcgatggcacacatttcaggccggacgacaacggagctgcttagcttgcaatcgacagcaaagatattatgccgttatgggttggaagattcttccaaaaggcatagggaagaagagctttgtaggaagtcatgaggtcaaagtgactttacgttgataataaaaacttagatgcacaaagcatcggagaattaatggaggttaaaaaacacatggctcgtatcgcaggtgtagatttaccaagagaaaaacgtgttgagatcggtttaacttatatctacggaattggtagagtaagtgctgatcgtattcttgcagaagcaaatgttgatcctaatactcgttgcagagacttaacagacgacgaagttaagagaatcagtgaagttattgataatacacagactgtagaaggtgatttacgtagagaaatcgctatgaacatcaagagacttcaggagatcggatgttatcgtggtatccgtcatagaaaaggtcttccagttcgtggacagaagacaaagacaaacgcaagaactcgcaagggtccaaagcgtacagttgctaataagaagaaataagcttctttgtgactgcttttaaagatgcaattaatcatttattattagagaaagtaggttagtttagatatggctaaagttacaaaaaaagtgacaaaaaagcgtgtaaagaaaaacgttgaacgcggacaggcacacattcagtcatcttttaacaatacaatcgttactcttacagatgctgaaggtaatgctttatcatgggcaagtgctggtggtcttggatttagaggttcaaagaaatctactccatatgctgcacagatggcagctgaaactgctacaaaagcagctttaattcacggattaaaatcagtagacgtattcgtaaaaggaccaggatcaggaagagaagcagcaatccgtgcgctctctgcatgcggacttgaagttacaagtatcaaagatgttactcctgtacctcacaatggatgtcgtccaccaaaacgtagaagagtttaattaggagggagatactaagatggcagtaaataaagttcctgttcttaaaagatgtagatcacttggtttagagccaagttacttaggatatgataaaaaatccaatagagaattaaaaagagctaacaagaagatgtctgagtacggtcttcagttaagagaaaaacagaaagctaaattcatctatggtgttttggaaaaacctttccacaactattatgagagagctgatcagatgaaaggtatgactggtcagaacttaatgactattttagagtcaagattagacaacgtagtattccgtttaggatttgctagaacaagaaaagaagctagacagatcgttgaccacaaattcgttacagttaacggaaaacaggttaacattccttcttaccttgtaaaagctggcgatgttatcgaaatcaaagagaagaacaaaaacattcagagaatgaaagacatcgttgaagtaactggtggaagattagttccagactggttagaagtagatgctgagaaattacagggaactgtaaaagaattaccttccagagagcagatcgacgttccagttgatgaaatgcttatcgtcgagttatattctaaataaaccggagcaacggattaacaagagtaaagccattgtctggcagttttgccagatcatatggcgtttactttttaatgtaagcaaaaaacccgagaaggagggactttgtagtgttcgattttcaaaaacctaagattgaaatcgctgaaatttcagaagacaagaagtacggccggttcgttgtagaaccattggaaagaggctatggtacaactcttggtaattctttgagaagaattatgctttcttcattaccaggtgcagctgttagccaggttaagattgatggtgtattgcatgaattcagttcaattcctggagtaaaggaagatgttactgaaattatcatgaacatcaaagaacttgcaatccgcaataatagttcatccgatgaaccaaaagttgcttatattgaattcgaaggtgaaggcgttgtaactgcagctgatatccaggttgactctgatattcagattttaaatccagatttagtaatcgctaacttaaatggtggtgctgattgtaaattatacatggagcttactatcacaaaaggcagaggttacgtcagctcagacaaaaataagacagaagatactccaattggcgtaatcgcaattgattctatctatacaccagtagagagagtaaatctttctattgaaaatacccgtgtcggtcagatcactgactacgacaaacttacattagatgtttatacaaacggaactcttgaaccagacgaagctgtaagcttggctgcaaaagttttaagtgagcatttaaatctcttcatcgacctgtcagaagctgctcagcaggctgacgttatgatcgagaaagctgacgatgcaaaagaaaaagttcttgaaatgaacatcgatgaactggaattatctgttcgttctttcaattgcttgaagagagcaggtatcaacactgttgaggaattgacaaacagaactccggaagacatgatgaaagttcgtaaccttggacgtaaatctttagaagaagttttagcgaagttaaaagagttaggacttcagttaaaccagggtgaagagtaaagcacaacgaagttgtgcgctttcgcttgaactactaatgttcaagcgataccttattatttcttatgaaaaaacgggcagaaatagtaag

SEQ ID NO: 14327 - DNA, 7151 bp, Unknown
  gut microbiota DNA sequence
atccccataaactctcttggtgacagttcccgctccacacgccacgatggtctgtttctcttccatgatcagaatgttatagatgcctgctttccccggacttgcgtaaccgacattttccagattgccagccatgctcttctgccggtacagataatatggttctaatcccatctctttagcgtattctgcggtaaggttcatatgctctgtggtgttgaccatcttgtaatctttataatcttccttaaacatgttaaggcgtgccgccctctttaatgcaagcgaatgcacggtaagattatccggcttcaacgcttttacctgctctaaggtatccctgacatcctcaaggctttcctccggcagacccatgataagatccatattgatatcatcgaatccaagctctctcgcaagctgaaaactctccacggtctgtgccacggtatgtctgcgtccgatgatttttaatgtctcatccttcatcgtctgcggattgatggaaattcttgtgatgtcccattttttcaacgtttctaatttttctcttgtgatgctgtccggacgtccggcttccactgtaaactccagacagtgtgacagatcaaagctgcatcggattttacggatcagccggtcaagctgatatggctccagtgttgtcggtgtgccccctccaatgtagatggaattcagatgtttttttccaaattttactgctacataatccagttctttttccaaagcatccagatagctgtccactttctgtctccagctcactaatgggtaggatgtaaacgaacaatacaggcaggttgtcggacagaatgggattccgatataaagactgtagccgttctcgtaatcgatcttttttaagatttcaagctcacgctctgcgatatcaatggaaagatcgattttctcatcggatgcaaagtacgttttttgcatgtaggatctgatctctgcctccgtttttccttcctctaaaaatttcatcgggattttcgttggccggattcctgtcagagttccccacggaagttttttgcccgtgatctctgatagaatctgatagaaattctgtttcagttcattttttgtttccgtgcggtctgaaaaatctaccggaaaactccggtcatgactttcctgattttttcccttccactcaatttttatctgctgtggctcatactctacctgaaactgtaaggtgatctcttcctcatattttttatcttctgccgttgcactcacattttcctccgggaaaaatgccttgatgagggaatggatatcatactcaaattccggcttgcttaactttgctaatatcatattgttttccttttctggctgtgtttcctattttgatgaaagtcttctttacagacgatattttttcatagtcagtctgttataaatacggattgtacatccgctctgttccgatcgttgtcatatctccatgccctgtatacacggcggtctcatcaggaagcggcatgagtttttcccggatcgcatggatcagctgggatgcactccccttcgggaaatcagtccttccaatagaagtctggaagaggctgtccccgctgaataacgtgttctgatatggaagataatagcagcagcctcccaccgtatgtcccggtgttaaaaatacccgtatatgaaatcctgcaagatctatttcctgctcatcttttaaatattcatcggcatagaacacaagctcgcttccctgccatccgctcagattcagctgcggattttccagtgtctctttttctttttcctgcgcgtatatttttatatgcaaaagctgcgccagctcccctgcccctgtcgcatggtcaaaatgtccatgtgtcagaagaattgccacaggtttcaatccctgctctttcactttctctgcaagctgttttgcacttgcacccggatcaatgatcagtacttcttttgtgtcatcattgattgcaaaatagcaattggtctgtaccggacctactacatatgtctgtatacttaatggtgccatatttctcttcctccataaaaagatgaaagaaaccacctgagccagatcagccggtggttctctcaatatcaataatactgtctatctgacgaagcttgtcgatcacgctcgtcagctctgcttttccttttgtgttaaatgaaatatcaatggttgcgattccctgcttactcgtcttggaatggatcgcattgatatcaatctcacgctctgtaaaggctcttgtgatatcaacgagaagcccggtacggttattgcagaatactttgatctctgccagataaagaccggaattgccggattcttcatcatgctgccactccgcatcgatgagacgttctctctccatatctgaaagattgataatgttgatgcaatccgtccggtgaatggaaacaccgcgtcctcttgtcacaaatcctacgatctcgtcccccggaaccggactgcagcattttgaaaaatggactgccacgtcataaagtccctttacaatgataccgctctttgattttttctccggaactttttctttattttcggagatcgtctcaagaacttcctcgtctgtaatacgtgcaaggtgatctttcttatattcctcgtacatacggtttacgatctgaccttcttttaaaccgccatgaccaacggttgcaaggcaggaattccagtcgtgaaaaccatacttgcgcatgattttatcctgatactctggtctgttgatatcggaaaggttgatcccttttgatttacaacaggatgcaagcagctcttttcctcttatgatattttcttccttcaactcacttcggaaccactgattaatcttattctttgcctgcgtgctctttacaatattcagccagtcgcggcttggtcccttggaattctgagaagtcaatacctcgatccggtcaccattctggatcacataatcaatcggaacaagctttccgttgactttggctccgatcattttgtttccgaccgctgaatggatgctgtacgcaaaatcaattggcgtagaaccgtttggcaggtttttcacatctcctgtcggtgtgaagcagaaaaccgtatccgaaaacaggtcaagatcactttttaacaggctcataaactccttgttatcggacatatccctctgccactctaaaatctgtctcagccagcttaacttctcttcctctgtaacggtcattggtgctgcagcaccgccattattgcttgcctctttgtatttccagtgagcggcgataccgtactcagcagtgcggtgcatctcataggtacggatctggatctcgaacggctgtccggtcggtccgatcagtgtcgtgtgaagtgactgatacatgttcggttttggcatggcaatgtaatctttaaaccggccagggatcggtttatacatctcatggatgacgccgagtgccgcataacagtcttttacggaatccacgataatacggatcgcaaacagatcataaatctgatccagcgttttatcctgattcttcattttcttataaatactgaaaaaatgctttgcccgcccatcgatctgcgccggaattccggcttcgtggatatgtttttttacctcttccacaaggctctggacataatcatccctgacactttttctctgggcgatctgatgaaccagatcatagtatgcttctggctctaaatattttaaagacagatcgtctaattcgatcttaattttggaaataccaagacgctgggcgatcggcgcatagatatccattgtctcgcgcgctttttccttctgtttctccggcgtcatgtatttcagtgtccgcatattatgtaggcggtctgccagtttgatcaggatcacacggatatcctttgccatggcaaggaacatttttcttaaattctctgcctgaacttccaccttatccgcatcgtaggacaactgccctaattttgtgacaccatctaccagcagtgcaacctctgcaccaaactcctgcctgatctcctcatcggtcataacggtatcttccaccacatcatgcaaaagtcccgctacgatcgtctctttatcaagctctaactctgctaaaataatcgcaacgcacaatggatggatgatatacggttctcccgattttcttacctgccccttatgtgcctcgtatgcaaggttatatgccttctctatcagactgatatccgtagatggatgatacttacggacactggcgatcaattcctgatataatttttcgggactctcaaactccttcattggtttgatactattgtcctcttcttttacgattttctctaattcttctgatgaaagttctgccatgtagatcacccactttatctatgcttttgtgtataatatatgattatattttattttctatcaaaaatcaacgcttaaactttgcatccggccaccattaccattctatctgataatctgacatcaggacgccgtctatttcccggtcaccgcaataagaaaagcctaattttatagctagtttttcagaaagagcatttcctttttgaatcagacagtgtacgagatgtacctgcagcacctctcctgcatattgcatgatcgcctgacagacttcataggcataaccctgatgttgaaaggatgtccggatcgcataccccaattccatatctccatttaactcttcccgatgttccacaccggccctgccgatcagtgtgcccgtttttttctcaaaaacgagccacattccatatccgtaaaaacgatacatattttcgatataggctttctgatattccagctcttcctcatattcatataacccctccatataatcggtcattccgggttctgcatacatggaaaaaagggcatccagatcagaaagttccagttctctcacaacacagcgttccgtctccagaatcgtccatggaatgttgaaatgtctctcatacacacgctgtaaaaacgtcatatcgacttcctcgaacccctcgacgaccatatcggcatgaagaaatgtatccgtttccggcttctgacaggcaatcgccgggacgtccacatctctggcaaggtctaaaagagactggttcgaagatagaaaaatgatatctctgctccgcttctctgacagcttatgaaaggcttcctccttttttattaatacaaatgtagttttttttattcctgcaagattttctcttaacaaagaaacttcacgctccggtatctgcgacacccatatctgttttggatactctttcttattataatatggcaaacctgttctccttattaattgttatgcgcaaaacaaccggtatctgaacagataccggtcatccctttaaaactcataaattaatatgcaatatttacatcgacatttcccttgattccaggaacacttcccttggaagagtactgccacatgttatattttcctttgtaattgcaggttgtgttgtactgtgcaacccagataaagtagttactaaatgcagatgcatcaattttattgttgtaccagctcttgcttgcgtaaacacctgcttttcttccaccgtttgcaatggtcttacagaacgcagccacgcatgccgttctggtgcctttatctaatccgttggcacgggctgctccgcttccgttctctgtatcgacaaagatcgggtaagaaagattgtatccagagcataaggtcaatgccatacttgcctcctcaacagcttctgcctcagttgtagcctgtgtgaagaagtaaacaccaacgttaatgccgtttgcagttgcaccctgaatatttttcttgaagcaggaatcctctaccaatgcccctgtctgtgatccgcggtaaccgacacggataattgcaaagttgatacctgctgcctttacagatgcccagtcgatatttccctgatggctggatacatcaataccgttctttccggaaccctgctgtaatgctccatcacttccgaagttgtaagagataccgctgatcacctgacttcctgttacacgctgatggttgctggtatagtaatatacttttccatcaatggtctgccatccggtgtaaaccggctcggtgtagtaagttccgtttgcattgtaatctgccacggttgctggttttttacactcggaatctttgtaaagagttctaccggatttatcttttaactgggttgttgtatttccagtaaaatcattgactgtaactgtacatgtgattttcttgtcacttgcggttgtcttggtatcgcccggtttggataagtatgtgatcgtacctgttacagttgcacttccttttccaactgctgtcagtgtacatcctgttttcgctccattggatacctttacaactttttcgttgctgctagcccatgtaatatttgtgataatattgcctgcatctgtcaatgttgctgtgagaccaattgtatttgcattattaatagtgctgttatataaagctgccgtctgtggtactgtgacagatgcactggctgcggctgcagcttttacccagtttaatgtgtatgctgttgtgcctgctgccactttgatcttcgtggaaccttctgccagtttatatccctgtgcttcataagaagatgcctgtatctcagtagcagtagcatctactgtgatatcttcacttttggattcttctgctttggtctttccatcaacctgaaagaaattatgtattaccttataagtagccttatctgctgctgttgcaacccacatgatgttatattcttttgcaccattctgaatggtaaaggttgtaccgttggaagctttatatccgtcatatgtttttgcagatgacaccgttttcgcatcctttgcaacagttactgtctctttttcatctgctttgtctgcttttgtttttccatcgtttttataaaacatatggacaatggtaatttcatatttatctggtttcgtatcatccggctttgtctctgtaccatctgttttgtctccaggtgttccattctggctgctgtctccaccagatgttccctgctgaccacctgtact

SEQ ID NO: 14328 - DNA, 2757 bp, Unknown
  gut microbiota DNA sequence
ttgtatttacagtgttcctaataggaagtaatcatatgatatgcttcctgtaaatgtaattatgccggaagataaagaacagatggcacttactattaatggaaagaagagaaatattcataaaaaagaatttaaaatattagcagaagtatgtgatattcctgcaaacgcagcagaaaaaatgatagaaaaattatgtgcattagaaaataaaatgttgtcacttgtggatgaatcctatttgcctcaagcgcaaagggatgaactgaaaacattgatcagagatcgtgtagcgattttattatgagaaaagaagaaagcggacatttgagcggtatgaactgtttctgagacgacatcagaatatgaaagtagtttttgtggaacttggtgtcgggtataatacgccgggaattataaaatatccgttctggcagatgacggcgcaaaatcccaatgtgacctatatctgcctgaattatgggcaggcttactgcccgctagagattgaaaatcagtccttttgtgtggatggggatatttgggagatattaaagaaagagaactaatgttgattaagcattagttgctctagtcgtgtaatatcagtgaaagtaactttgaccccttttttatttaaagctaaaaagcttttaacatttttacgaattacacgttgtaattccctttttacaggaactgggttaccattttttgtatgaatgtgatcaatatagttttcggttacaggaaacatattctggataagaaaagccgcattttggctatcaaattcacctaaaataatgcccttacaaggtttgcctttttctaaaattttatgccggatagatgagaatttttcatattgtgatgaaattggaatcatccaatataggtttgtaagctcatcttttatgcagtataaagtaggtctataatgaccggattctttattttgtaataaatacttatcttgtacatagtcaaaataagtatctttaatatgataggcatatccttgaattatttccatattattctccatataaagtaagaaccccttcgctaaaaagtgaaggggattattttcaagccgttcatttatgagtcgctaacggtgggcgaacattattttcgagccgtttatttatgagtcgctaacggtgggcgaacattattttcatttatattctatgaaagacaaagttatttgtcaatggaaatattttcaattatctttatttttattaatttcatccatgtatccggcagttatgataccggcaggcaatgctacgattgcaataccaaatatggcagataacatagtgattatgatatcaatacttttagagtagcggactgctttaaagatgcgaaatacacgaaaagttctaaaaagacggaaaatcttgagtagtcgtaaacttccgctaagaaccgtgatggaagggagaatggaaatttaatcaacaattgtcattgggggatataacaaatatgctattctttcaaaataaaaatatatttaaaacaaccgcatctgcccgtccacccagcttttctgcacagcctcatgaatcacatcctcagggtgcagattcccaatcaaaaaaggcgagtgcggatcgtgatttgcatagttctgtcgtactgtctgctcgtcataattggcatagcagtagcggcacagatgcgggcaggtgttgtaagccccgatatcgtttccgagaaaacaggcacattctttacgaagtggctgttttttgggaaagattagggaagtatgcagggcggtttcataaacttgctgtgtcatgcatccgctgcaatcggcactataaggagcaagctcgtctccctctccgcaagggcgcactgtcataccatgcgtggctgcaatttcaatcatttcttttccgagaaaaatacggtcatctttaccgacacttcgtacttccggaaaattcttccttactttctgatacaggtcgataaaactgatcacacaggttttcgtagcatcacaaaggcgggctgctatatgttcaaatgctttcaggtgatagtccaccgtgtatgtctcatccagaaaaattgggtcatagcgccaagccatagcatcgggaccaacgatttcagataacgctaaaaagctgtcgatcactttttccttatccggaacatgaggctcgatatcggtgccgtaaggcgtgatcgtgacaaaccaatacatgccgaaaggctttaataaatccatatattgtagcataggagctggatttttcgagcaaaaaccgatcaggtctacaaatgtcggatcgaggcggtattttgtcacctgcaccgggttgtagggattgcgtacaagaacgtaaccgtcctttattctgtttgtaaaccattccgcataaaatgccggaatgtcggttctcatgcctgtctgtaagatcataattggctcccacctttccagagtaaaatagaacataaaatttttatacgaaaacgagtatggttcagcagtaataaaataatggtaaacgaacttttggaaaaaagtcaagaaagagttctgccagaaaatgaacagatgtaacaattgctattccaacgatgaaatggtaaaatggattgtaaataattaggtcatctggaaaacgacaaaagaaaagggacggaataatgaaaaacaaattcataatacttacaatagcaggattgctcctcgtatcactagctgcatgccgaaac

SEQ ID NO: 14329 - DNA, 2515 bp, Unknown
  gut microbiota DNA sequence
ttgatgtgttataggcaattgcctaattggaatttagataaaaacaggagagcaggacatctgcatgtaaaattactatggaaatttctgaaaaagaatctgtgttagatagagtgataaaacattacagagaaaatgagacgttcttaaaagcaaaagattacaacatattttcagtcctgcagatacaggcaaaggaagtgcttacctgccgcatgatagcggatctgttgaatccaagaggacagcatggcgcgggagcggaatatttaaaaatttttatgaaaaattgtcttggaatagaagaaacaaagactgcccttttggatcaggcaatcgtaacggcagagtacagcattgacgcagagcggagaattgattttgtgatcgaatcgggaacccgttttttcccgatagaagtgaaaatatttgcagcagatcagaaaagccagtgttttgattattatcaattcgcaaaaagaaaagatgcgcaggcgaaggtttattatctgacactagacgggcatagaccgggaaaagagagcgtttcgtcgggaaatcagtttatcccggaggaggatgttgtttgcctttcttttcgggaacacattttaaactggctgagagcatgtaaaaattgcggaaagccggagatgatcccgatattagagcagtttattcaaagtattgaaaatatcagtgactatacgaatgagaaggtgagaaatatggtgatcgatgaacttttggcatcaggggattcgctcagagccgggatgcagattgcggattcagtcaatgcagcaaaggcaaagctgatctatctggtcatggaagaatttgaaaagcaattggtggaagttgcagacaatcatcattggatcagggagaaaaaaatcaactggtatgaataccgggagcaggcggatgcatctttttacaaatactattcgacttatcccggaatcaactatattgtaaaggatgccaaaatgccggacggaaagcagttctggtttcgcgtggaggtggagcatggactgtttgccggattctgtgtctttgatccgaacgcggaatcggaggaagggcagggaaatcaggttgataagtatgatgagaaaacgaaggcggctgtggaacagtatttgaaacagactgtcagggagcaggaggactggtgggcggcatggtggtatctgcctgccggagaacaaaaagaaaacgatactgttccaaactttaaagtgatgaatgaggcagctatttcgctggcggatgcacaaaaacggtcagtgtttgtgaaaaaatgcatctgtacgattgaggaaatgttgaaaaaggttgtgaggtaatgcacttaccattttataagaaatgaaagaagcaggaaaaatcattgatgaagattgttgcaggtttgggaagaattgatgagtatgagagattcgtaaaagcaggggcggatgagtttttctgcggctatgttccgtttgcatgggcagaaaaatatgggatgattaatccgctaaaccgcagggaagtccgtttttacaatgtgcagattggttcactgagtgaactgcagattttgaaaaacatggcggactattatggaaaaccggtaaagctgacgtttaattcgctgtattatacgaaagagcagtatccggtcatcgcagagatcatttcacagtgcatggaagtgggatttgaaaattttatcattgcagatccggcgttgattctttatctgagacagaaaaaaatttcctgtgggattcatttaagtggagagatgtcggaagtgaaccgttacatgttagagcagatgctgcccttcggaatcaggagagtgatttttcacaggaaaaattcactggaagatatgaaatcctgcatttccttcattagaaacatagaccgaaaagaaaaatcttctgataaattaaatcacgattatattataaaacaaccaagtgacccggtgatgaattgtacaaaagaatatgaggcatttgtgttaaatgaactctgccagttttccggtgcattttgtaattccctgcattgcgacgaactgacgcatctgtgcagagtgccgtatgaattgggtgatctgtgcagagatatctcgcacaagacatacataacggagacagataagatacattttgataaaaacggttacctgaccggaagcaccggctgtggactctgcgcactttaccagatgaaacagattgggattacgcatctaaagctggttggacgtggtaattatacagattttatggagaaagacatccggcagttaagaaaagtgctggaaattctggaaaatgcatccggcgaagaggaatatcaaaacgagatgagagcatcactttttccggacggatgtagtcaaaactgctattatatttattagtcgtgttgatagaatttattaataataatgacttttcaggaaaagagaacctgtgctatacttctaacgaatcatagacagatg

SEQ ID NO: 14330 - DNA, 4463 bp, Unknown
  gut microbiota DNA sequence
ggcgtagaaacaggcatttttttgttcgcgttttaatggatgaaatggtgttggaggtacaggtatggcttaataaaacttacaatgtaggtgtcgtggaggatagaaataccggtcagtgaacagcttgtagagacaacgcaggcaggaattggtattgataaatgtatatggtttcaataaggggaacagcaacaggtcctacgttttttactacatatgaaaatccagttgaaccagacatttcacaggaatttactgttttcaaaaatatatataattcaggtttatcaatgttttataactggttgatgagatagtgctattagtaaacatacttaattgagaaggagaatatgtatgaaaaacaaaattaaaatgggtttagcgttattaatgttcgcaactgtaattccaaatactgcgtttgcacaggattcaagtaatcaagttccaagcgaacaggttgaatttgcagatatttatatcggagacgaattgattacagttccggttgtgatcgagtctgaaattgtttgcaaaacagcacgaagtggtgtacaatatgaagatacaatagagagtgcaacttattatatcccggtaactgaagaagggaaagcatataatgaagaatatgtaagcggtgcgagagcaagaggaacagcgacagatacttacttagatccgagaaaatatctgacagcaacgagtattatccgatatacaatgtcttcaaatgatgagtatgttttgattaacaatgttgcaattacgaaaaacagaaatccagaatcatcttctactggtggatatttatatgggattggaacaccgacggctagaattgtgtgtgttggtcttgcaaaaaataacaggggatatgagcaggtagtagattcccagagtgttccatggggaacaacaggagtgagcactccatcatggtggactcctgtaatgtgtggcagttattcggatcagtatagggggcttgtacaatatagctttaatttgatttacagtgatggcacagtcagttgtgcgtttacgcatggtctggcaaaataaagtaaaaaaggaggaggcaccatggcaacaaacaaatcattaagcagaagaacgattttcctgttagtggcggcaattttgtatctgatgattccacagaatgctacaatgcctatgccggaggaagcggtattcccattttcattgttgtcgttgtcgcaaatagcaagagtgtttgctttcagacaatggattgccatggatttgattctttttacagcagtgctggtcatcatgcagctgatccgtggaaagcatgaaggaggaatgtttcttagaaataaaactgcaagaatcatttgcatggcagcattcttagtagtatttcttccacttgcatacataacgataccaaccgtattcattctgggcaaaccagcctttatgagcatggatgcctgggtattcatgttcggtaaacagggcggcgcgaaccagtacattcttcatctctggtgggcagcatcagcggtactgctggacatgggaattgcgaaataaatttataaaaataacccgcatggaatcagagcatattctgtttgaaattccatgtgggttgtgttattttacgcaatttgaacataagttgggaacgttgttgttgggagaatggggtgggtttaccgttctaatcgtccacttgccccacaaggaagcacaagtccattggatgacaccggaagcccaatcccatcggctgctaccgtttcgtgatattttttcaacactgtgttcatcatatagcttaacaccgccggctgtaatccggttgtataggagttgatcaggaattacaggaagccatttcggcatttctggacaaaaaagaaaaggaaagcagaatattagagattacaacaagagaggggaaatgttgtatagcagttgatgatattatatttttagagagcagacagcattacttgaagatttgttgtgaaaacgaaaatttcgaattaagaggcaggatttctgattatgaaacaatgctggaaaaatatggttttgtacgtgttaatattggattcattattaattgtaaatacattaaaatcttaaagaccaagaaaataattttatgtaatggcatggaaataaacatcggaagcaatagacacgataaagtgcggcacgcatatatggaatatgtccgggagaaaaataaatggaagttgtaagtatggctgcagagatatatgcaagcgcagcgggaacaattgcacagatatggattctttcagaattatttccaagaaaacagtctgtaaaaaaagtatatatagtgggatggattttgttaaatttctgcatcgcgcattttgtgttgttgccgaatatatggcagtcgctgcttggcatgggtgtgatgctattgatgtcgtgtatcatgcttgagggaaggacagaacaaaagatgttagttatcattgcctgcaatgtttttatgattctggtaagtatgctgagagggagaataacctttttcttgtcaggggaatctatcaatgagattagtattcagggatcggagagtctggcaagggtattaggaattgtacttacgaatacattatatttggtaacagcctatattttaacgcgtttttttcatgataaaataaaactgaaaaaagaagaatatattattataataatttattatattattttccttatagtggttttattatcaatagctatgtcacgaaatgtggacttttcgcttatatggcagaaaacatttttgattttagacatgttgatgtttattgccaatattatagttttaaaaatgatatttcatataaatcagcaaaatcactatgaaatggaaaatgcattgctgcatatgcagataacgcagcaggagaaaagaatcagggaagaggaaaaaaactatcgggaagttcaattattgcgtcatgatctgaaaagatatttggttacatatcgtcagttgcttcaggagggaaaatatgaggttatagaagctgacattgataaaatactggggaaaaggttaaatacaaatcattgtgtttatacagaaaatacaatactgaatgctgtaatttgtgagaagatggaacaatgttccattaaaaatattaaaatagaggtgcaggtaaatgcagacaaagatatggattctatagaatatggagttgtgttatcgaatttactggacaatgcgattgaggcggaggaacaggaaaaagaagaaaatagatatatctgtttgaatattggagtagaacagaatatgattcatttggtagtgagcaactatatctcagaatcggttctgcaaaataacgctttgctagaaacatctaagaaaaataagcagttgcacggaataggtttaagaggtgttaaagagtttgtaaataataaggaaggtgagatagaaatatttgaagaaaatcatatgtttgtagtgcatatttgtgtgtgcgtataaagtatgccaaaaatgggtaaagtacgccagatatattgagaaataaataaaatgtggctattttagtagtaaagaggagatgagggcataatgaattcgaaaaagggcaaaaaagtatatctggaaataattttattttttatagtaagcatttactgcttattggcacctaatagggaaacatgcatggatgatacctggatatcgagcatagtaggactgagtggttctgtgaaattattttcggtaaaattatttttgttggcaccattatggtggggaattttatgttacatattgttaaggcttgcaaatccttatttaaaggaacatggcgtaaaactgcaaataaataataggatatataaagcattgataaaaatatttacaattgcatttttaattgcattaatatattggtcatgcggatttaccttgtatgtagtgtttccgcctatgccgtttttggttggttactatattatgaaccatcgtattattttaggaattagctggtgtattgaggtaattcttatttatgtttcgtttgaaacttgacagttatctgtataaaattgtttatggaaattataatggtaaatatatgtgcgtgcgtataaagtatgcctaaaatgggcaaagtacgccagatatattgtgaaataaataaaatgtggctattttagtagtaaggaaagaggttcgatgagaaagattactactagaatagtccatttttttattgaaagtaaagttatcgatgaaacagatcgagagatttatgaatatggtttggaaatattgagtgaaaatgtaatgttaacagtctttcttatattatttggagttgcgattgggagaggcgtagaaacaggcatttttttgttcgcgttttaatggatgaaatggtgttggaggtacaggt

SEQ ID NO: 14331 - DNA, 36266 bp, Unknown
  gut microbiota DNA sequence
tatcctctgataatccctaaagcaaaaggtgaaaacaatcaatcagaggcatcactttgatgcctctacacaacaaacaaatatataatagaaatctgaaaaggaaaaagtcatagtgtccttgacaaagggtacactttagaaagagcatttgtgaagattaccgcagcgggcgtattttaagaccgctgttaagtgaaaaatctctcgaagtgttaaaggcagagggacatgatgtgtccgcaggtgtaagcagcagctatccggtgcagactgtcaaaaaaatggacggggatgagaagttttacggacttggggacaagaccggatttttgaataagcgggattatgagtacgaaaactggaactccgatatcccacaggcacatacagacgcttacagggcactgtacaagtcgattccgtttctgatcacattgaagcaggacagtgtttacggtattttctttgacaatacatacaaatcttatgtaaaccttggaaaagaaaatgaggcatactactactatggtgcggatgccggaaatcttgactattattttatcgcaggagatgcgatgccggatattgtaagtggatatacttacctgaccggaagaacgccgcttccacagttatggacgcttggttatcaccagtcgcgctggggatatgattccgcagcctgcatcaaaaacgttgcagaaaagtacagggaactggatatcccatgcgacacgatgcattttgacattgattatatggacggctaccgtgtgtttacgtggaatgaaaaggactacggcaatccggctgaaacattagaggaactgaaagaggaaggttttaaggcagtctgcattattgatccgggtgtcaaattagatccgggctacgaaaaatacgacgaaggaatcgccggagattattttgcaaagacaccggaaggggaagtctatgtgaatgctgtgtggccgggagattctgtgtaccctgattttggaaatccgaaagtgcgcaaatggtgggcagaaaaccagaagtttttgacggacattggcgtagcaggtgtgtggaatgatatgaacgagccggcaagcttccatggagaactgccaccggatgtggtatttacagatgaagaccggaaatcgacacatgctgccatgcataacgtgtacggacatctgatgtcgaaggcaacctatgaaggcttgaaggagcagaccggaaaaagaccgtttgtgatcacgcgtgcgtgctatgcaggaagccagaagtacacaacggtctggaccggagacaaccagagcttatgggcacatcttcaaatggcagtgccacagttgtgtaaccttggcttgagcggtctggcatttgcaggaacggatgtcggcggatttggtgcggactgtacggcagaacttttatgccgctgggtacaggtcggagcattttctccattgttccggaatcattcgtccaatggaagcatttatcaggagccgtggcagttcggggaaaagacggtcaatatataccgcaaatttgtggagctgcgttaccgcctgcttccatacctgtacgatctgtttgcggagtgtgagaaaaaaggacttccaatcatgcgtccactggtgcttcactatgaaaaggatgaaaatacgtggaacttaaatgatgaatttttagtcggagagaatctgcttgttgcacctgtgttagagcagggacagacgaaaaaaatggtctatctgccggaaggtgtctggtatgacttcaacaccggaaaacgctatgagggaaaacagtattatcttgtagatgcaccgttagatacctgcccgatgtttgcaaaagagggaagtatgatcccgacttatgaagtgatgcaatatgttggtgaaaaaccgtatgacactttaaaaatgcttgtatttccgggtgagggcagctacgtccattatcaggataacggaagcgactttgcataccggaagggtgcctataatgaatatgtattcacaaaacagcagaatgacgacgtcacaatgacaatgcagcaggaaggatatgacaagccttataagaatattgaatacatttttatcggaaaatagaaaagcgcgcaggaaccacggaaaaaatatggcatatcttatagtgatgtgatggaaataaggagtatcgcgtggactatagagaggaaccgtttttccgcatgcagcagtttgacactccgaaagtgcctttttatatgagctatccgatgcagaatctgtatctgacagaaatggagtatgaaaaggatatggaccggatgaaagaactgtatccgagagatgttgcacgtattatggaagtcattgaagatgagtgcgataagatggaatatgagggaagcctcatgtttgacgagtatccggaccggctgatgcttgagcaggtgacagagcggatttaccagaccgtgaaaaatggaacggataccgttacggcagaagaattctggggaggcagcaatccaccaccgccgccgggcagaccaggaagcatgccaccgccgccgccgggcagaccgggaagtatgccgccacctcctccaccaggaccgaatgatccgtggcggagcctgatcggggtaatgttaaataatgaaatgtatcgaaggagatgccgccaccgcagatgcagaagatggtggtagacaaaaacgaaaaaactgcatacaatatagctatcgccgttttggcggtagctattttcaatttatggaaaattgcgatgcaatattcgaacagttttataagaaatttggaggatcatagtgcagaaaagtacgatcaaagcaattgttctgccggttatttttattctggcggtgataatattcagttttatgacaaatcagaccaacgaagacctgaccacagagatgtcggaggcaacgctgccggttcttaccctctatgatggaaaaacagcgatcaacgaactctacggatacacggagaaaatggatgcagcttccatgcgtgatacgatcacgccgatcggggaagaccgtctgcttccggtcacagtgcagacctatcagaccgcagtggataaaatctcttatgagatccgcagtctggatgcagaaagactgatcgcaaacgcggatgttacttcttatacggaaaataaaggcatgatctccatgcagcttccaatccagaatctgttagagaaggacgaagagtatctgctggtgatccagttagagagtggagaccgcatgatctactactacacacgtatcattgaaccgcagaactgctatgtttccgagtgtattgatttcgtaaagcagtttaatgatactacatttgacagtgaaaaggtgggaacactcagcacttatatggaaaaaacaaccggggataacacaaccctgcagtatgtgacactcaataattcactgaatcagatcagctgggctgaatttcatggtacaaggctgacaacgccggtgccgtctatcaaggaaattacatccacttacaatgtcattgttttagactatgttgtgacacgggtaggacagaatggtcagagcgaatactataacgtagaagaatattacagagtgcgctataccaatacgagaatgtatctgctgaattttgaacgaacaatggaagagattttccgcggagagaatgacagcatttccggaaataatatccagcttggaatccgctcaagagaggtggaatatcagacgaatgaatctggaaaagtggttgcctttgtgcaggagggagaactctggagttacaatcaggaggcaaatacacttgcaaaagttttcagcttccgcggctatgaaggtgtggatgaccgtgaaaattatggggaacacgatattaagatcgtgaatattgacgaggcaggaagcattgactatatcgtatatggatatatgaaccgtggaattcatgagggtacagtcggaattgcggtatatcattatgacagccttgccaacaccaacgaggagcaggtgttcattccgtccagccagtcctacgaagtgatgaaatcagaattgggacagttaatgtatgtgacggagagcggtgcattttacatcatggtagacggaaatgtctatgggatagatcttaattcccttgacaccaaagtgctggtggaggaactttcggatgaggcagtggcaatctccgaatccaaccgcttcttagcgtgggtagatccttccgctgtccgtggaagtgatacgatccacatccttgattttgtcacggaaaaagtaacagatgtgacagagagcacttctgactatgtaaagccgttaggctttatgcaggaagattttgtttatggtgtggcaaagtcatccgatgttgtgatagatgctgcgggtaataccatattcccgatgtatcaggtgaaaatcatggatacgtcctcggaggatcaggagattctgaaaacatatgaaaaatcgggttactacgtgcagagcattacgataaaaggctataccatgtacttaaaccgtatccagaataacggaactgcctacgtggacgcagatcaggatatgatcatgaaccgtgagggtgacagtttaaaagtggtggatattgcaacgagcaatacggatgagaaagagacacagattctgatcacattgcaggaggaggcgaagaaaaaatcgccgaagatcctgacaccaaaagagacgatcttagagcagaaacgtgaagtagccttaaaagaggaaacagacagtaatcgttactatgtttatgtgaagggggatgtcgtactcacaacagacagtgtctctgaggcgatcattacagcaaacagccagatgggcgttgtgattaatgacaatcagcaatatgtatggaaacgctccagaaagaacgctcagacagcgtttaatgatatcacagtcggcgaggaggacagcggggcaggaagcattgcacagtgtgtgaatgcgattttggaaaaagagggaatcaacatcagcgtcagtgcgctgatctcacagggagagacaccgaaacagatccttattaataccttaaaggatgcagccgttttagatctgaccggctgtacggtagatgagatcctttattatgtgagcaatggttatccggtatttgcaatgacaggaagcaatgatgcggttcttgttgttggttatgatgcgaacaacatcacactttatgatccgacgatcggaactacttataagcggacgatcaccgatgcaaatgagatgtttttcaatgcgggaaatattttctttacctaccagaaataaaaaaaaacggataaaacaacagaaaagtgcataaaatttctgaaagttccacggttccttcgtggaactttaacagttttccataggacgccttgcaaattcaagggtaatagtatatattttgaagagtatgaaaaagttgatgtatctgtaaagggaaaagcagatatcgaagtactgtgaaagaggaagtgaatggcatgagcaaaaaagagatagttgtatccaatgtttcagaagagcataataacccaattgctgaattagttcaggtcgcttgtcgttttgatagtgagattattttagaaagtgataatcgcagaatcaatgccaagagtattatgggaattatggcattcaatccatccaagggaatgacagtgaatatcgaggcaaacggtgatgatgagcaggaagcattagtagcaatggaaaagtttttagtttgtgagtagtttttgtctgaaggaggaaccaatttatggaaaagaagacaacagcagcaaaaccagtagtaaaaacaacagcaaaagaagcatctaagagcactgtaaaagagacagcagtaaaagagcctgtaaaggaaaccgcagctgagacaaaagcagcagcaaaagaggctgtcaaagaagttgagaagaaagctgcagagacaaaggtagcagaaaaagtagaagcagctacaaagactgtagccaaaaaggcagcagagaaagtagaggcagctacaaagactgtagcaaagaaagcagcagctaaaaaagcagctcctaagaaagaggaactgaaaccggaagtatatatccagttccagggacaggaagcagttgttacagaagtgatcgagaaagcaaagaaacagtttgaggcagaaggtcacagagcatcttctatcaagagtattcaggtatatttaaaaccggaagaatatgcagcttattatgtgatcaaccagaaacatgctggaagagtgaacttattttaatacataagaattgaatcaagatacaaaaaaaggaattgccacacattgtggcaattccttttttacgcttagattcatgagaatcaaattttggagagcatacgtctcttatttgtgttcttctttgtatttagataccagtttctggattctgtcatatgggtttaacagatcgctgatggaggaatcgtgatttaaagtatcaatgatgtaagcgatgtatttactcatatcacagttgatgtagtatggtctggaaagaagttccggtgtctggtaagtaaggtttgtggtaactactttgtagatgatatcgtcctctactgccttatcaaaacgctcaagaccatttgtgaagagaccgaaagtagctactacgaagatacggtttgcttttctcttctttaattcggtagcaacgtcgatcatactttctccggaagagatcatatcgtcgataatgatcacgtcttttccttctacagaagttcctaagaattcatgtgcaacgatcggattacgtccgtcaacgatcttgctgtaatcacgacgtttgtagaacatacccatatcaacaccgagtacgtttgcaaggtaaacagcacggtttgtaccaccttcatccggggagatgatcattaaatggtcattgtcgatttttaagtcatcacagttctttaagatacctttgatgaactggtaagctggctgaacagtctcaaatcctttcaaaggaatggcgttctgtacacgaggatcgtgtgcatcgaaagtgatgatgttatcaacacccatagcagtcagttcctgcaatgcaagtgcgcagtctaaggattcacgtgcagtacgtttgtgctgacggctttcatataagaaaggaatgatcgctgtgatacgtcttgctttaccgccaacggcagcaataatacgttttaaatcagcgtaatgatcgtctggtgacatatggttttcgtggccggatacagagtaagtaaggctgtaattggtaacgtctaccatgagataaagatcatatccacgtacagattctttgatcacaccttttgcttcacctgttccaaaacgtggtacagatgtggagatgatgtaagagtcgcggtgataacctttgaatgcagcttcattctggtgtgcgtgttctcttttttctctccagcctactaagtactggtcaactttggcgcctaattcttcgcagctctttaaggggattaagccgagtgcgccgtctggcatggtttctagaattctttcatcgtttggcatgagtggttttcctccataaaaattaaacattaacaatttatttcaatagatggtaaataaggggatatttagtgcatctagtgaatacgttttttcaagcggatatcatcaccgaataatttgatgatggtatagctgttcgatatcctggaaagaacacgttccgagtaaatatccgcaacctgattcatgttcagattggtggaaataatcgtggacttctgtcttaagatacgttcatttaaacacagaaacaactgcgatgtggtaaacgagttcgaaagctcagtaccgagatcatcaatgatcagcagatcgcagtcaaaaatattctggtgtgtggcgatcgcatctgcgtctttttcaaacacacctttgcttaatatatcaaataattggaacgccgtaaagtagattacggaatgtcctgaatctaataactcttttgcaatgcagtttgatagaaaagtcttaccaattccagtatctccaaaaaaatacagattagcaaaagtggaatcaaactgatccacaaattcatggcactttgcaacagcagctttcgcagttgcaagcgaggtaagtccggttgccgggttgacagccgtatctgaataatattccagtgacagggtgctgaaattctcttttgcgagaatgtccttgatgttggactgggtatagatcagatcgattgcctgctgtttgaagcagtggcaaggcatgccgtcaatatatccggtgtctttgcagtccggacattcatagaccggctcaaaataattttccgggagagagagttctttcatcagagctttcttccgggtgcgcagttctttcagtctggcttttaactccgtgagcgcagaattatcaccgtctaagagacgtctcgcagaagccacggaaatctcggcaatggaggcgtcaagagccttcagttccggggaacgttcataggctgctctggtgcgttcttctaacgcatgttgtgcttttaactgttttgcatcgtatgaacggaaaatttcgtcatactgcgaattatttaatgccattggattctccctgttatcttaaaaaagaaagatactgtacgaattaatgctgcgcagaagtagtaagcagcatcttttctaactggtcataatcataggaacgctgttcaaaattattaaaacggtttttggactgggcgtttggtgctgtattcgggacgacagccgcttttttcttcttctggtgttcctcgtcaagctttgtgatatcttccggcgtggttacatggttcttcttccagcttgtcaggattgagtcaatatactcaaacttcggctggtgtattgcctgtatcgtgcgctcacacgcgcatgagatcacttccgtggagaaaccatattcagaacgccatttttcaatgtaggcagtctctgccggaacaagggaacgtccggtgatgccgagtgccttcatgacagcaaaataaagctggctgtggattccggcagcctgttttgcctgatctacagttgtaatctggttatctgcccaggcaagggcaactttttctatgtaacggatactggtgtgtcctttgctcacacagtattcaatcagatattcgatcagatctgtggaaaaaccaagaccgtcgtaccagtataagatactgttcatgtccgttggagttaaaatacgtccaaggtaacgctctgcaataaacaaaagctctgcgaccgattcctgtttgcggaacatggaaatgtcctctgcagaatagttctttggttccggagcagacggtttttgggaggcgtcctcagctaacgctgccgtggatacttccggagaagcagcagcctgtgaagataccgtgtccgaagcctcgttttcggctggtctgcgtctggtatctaaaaaacagacgccggtcaggttctcactggaatcgtattcgagacggagcagatgcatccgctcccagtagcttaaagcacgcttgatgtctttttccgtgtgttcaaacttatctgccatggcagagatagaaaacgccgcatccggtgcatttaactgtcttaacagataaagatatatttttacaaactctccattggcatccgacatatattcatcaatgaaaatattcgatacactggtggcagaggtctgactgtcactatgaagtgttatatttgccattgtgttcattcctttcataacagagctgtctggaatgtattatccattagctcgtcccaaattatagcacaggaatgtaaaaaagagaagagaaaaattgcccacaaacccagcaaaatcaaggcttcgcaaaaatgtggataatgtggataaaaaatagcattacaaaaagccatttccggcagaaaagcacagaagtgagaaaatataagcgcttacagcctttttaggatgaaatgtggataactttatgtaaacaaaaaaatccacattcaaaagttgaagttttccccaattgaatgtggataatgtggataagttatctgccaagcaggtgttcgccaacatttacaatgtctccggcgcccatagttatcaacaaatcaccgtttatacaattttttaataaaaagttttcaatttctgtaaaagaaggaaaatagtggacatccgtgcccttttcctttaattttgcctcgatatccctggaactgatgccgaaggtgttcttttcacgggctgcgtaaatatcagctaacacaacgacgtctgccatagagagaacgtctgcaaagtcatttaaaaatgccttggttctggagtaggtatgcggctggaacaccagtaccagacgcttgtgaggatatttctttgcagcagttaaggtggcgcggatctcggtcggatgatgtgcatagtcatcaatgactgtcacaccgtccacacagcctttgtactggaaacgtctgtcagcaccgccgaaggcagcaagaccggcaagaatatcttcttttgaaatctttaagtcgagggcaagcgcaatggctgcaagtgcattggaaacattgtgcagtcccggaacatttaatgcgacatccattactttctcgccgtggtacatggcagtgaagtttgcacatgctttttcgttaaaggtgatatcagcaggataaaaatcgcaggcatcactcataccgtaggtaatgacctgtggagcgagtccctctacgatctcctgatagttctcaatttcgccgttgatgataatggcaccattttcttttgtattttttgcaaataagtggaaagaattgcggatatcatgaatatctttaaagaagtcaagatgttccgcttctatatttaaaataatgctgtattttggacggaaattcaaaaagctgtttgtatattcacaggcctcggagataaatacgtcagattttccgacgcggagatttccatcgatcgcttttaagataccgccgactgtgatggttggatcttttttagcggcgagcagaatctgggagatcatggaagttgtggttgtttttccatgggtaccggatactgcgatggaattctgatagttatccatgatctgaccgagcagttctgcgcggcttaacatcggaatacctttttcttttgcagcggcaaattccgggttatcttcacggatcgctgcggtgtacacgataagatcgataccttctataatattggaagccttctgaccatagaaaatctgcattcccatatgctctaagtgtctggtgagttcagattctttggagtcagaaccggaaatcgtaaaatgttcctcaaaaagaatctcagcgagaccgctcatgctgattccgccgattccgataaagtgaatgtgtattggttcctgaaaattaattttatacatattatggatacctgcctgttttttcgttgattgttgatgaaaaagtttatgaaaaacttcctcattttataacaaggcgttgtataacgcctgaaacagttacattataaccatatatcaggaatttgcaaattcttttcggacaattccatgttagctattttgacgaaaaaaacaggacaaacacacatatttgtataaaatgtcaaaaaaaagaaaaaaattctgaaaaaattgtgtaaaatgatgtacattgaaaaatggttgtgatatacttgaaatatcaagaggactagattgactagaaagtgacgagaggtgattgacgtgattcgaaaagaaatgatagcaatgctattagcgggaggtcagggaagccgtttaggtgtcctgacatcaaaagttgcaaaaccggcagttgcatttggaggcaagtatcgtattatcgattttccattgagcaactgcattaactccggaattgatacggttggtgtattgacacagtatcagccattacgtttgaatacccatatcggaattggtattccgtgggatcttgaccgtaataacggaggagtaacagtacttccaccatacgagaagagtaataacagtgagtggtattcaggaactgccaatgcaatttatcagaatatgaattacatggagcagtacaatccggaatatgtactgattttatctggtgaccatatctacaagatggattatgaagtcatgcttgatttccataaggaaaacaacgcagatgttacaattgccacaatgcctgttccattagaggaggcaagccgttttggtattgtgatcgcagatgaagataaacgaattcaggattttgaagagaaaccggaacatccaagaagtaatctagcctcaatgggaatctacatatttagctggaaggtattgaaggaagctctgactgcaatgaaagatcagagcaactgtgactttggtaagcacatcattccttactgccacgagaagaaacagcgtctgtttgcttacgagtataatggatactggaaagatgtaggaacgcttggctcttattgggaagccaatatggaactgatcgatctgatcccggaattcaacctgtatgaggaatactggaagatttacacgaagagtgatattatccagccgcagtatctgtcagcagacagtattgttgaaaagagtatcatcggagagggatctgagatttacggagaggttcacagttctgtcatcggagccggcgttacgatcggcaagggcagtgtcgtgagagattccattattatgaagggaacccagatcggtgagaatgtcgtcatagacaaagcaattattgctgaaaactgcagcattggtgataacgttacattaggcgttggagaggaaaaaccgaacaagttcaatgagaagatttactcctttggtcttgtgacgatcggagaggattccgaagttccatcgaacgtctcagtcggaaagaacactgcaatttccggcaagaccacaaaagaagattatccggaaggaattcttgacagcggtgaagtaattattaaggcaggtgactcagaatgaaggcagtaggaattattttagctggcggtaataacagccgcatgcaggaattatcgaacaaacgagcaattgcagcaatgccgatcggaggcagttaccggagcatcgacttcgctctgagcaatatgagtaattctcatgtacagacagtggcagtgctgacacagtacagtgcaagatccctgaatgaacatttaagttcttccaaatggtgggatttcggacgtaaacagggtggtttatatgtattcaacccaactgtaacagtggataacagctggtggtaccgtggcacagcagatgcgatgtaccagaatatcagtttcctgaaaaaacgtcatgagccatatgtcatcatcagcagtggtgactgtgtatacaaacttgattttaacaaagtccttgattaccatatcgagaagaaagcagatatcacggttgtgtgcaaagatatggatccgaatgtggatgtcagccgttttggtgttgtccgcatgaatgaggattccagaatcgttgagtttgaggagaaaccaatggtttcccagtccaatacgatttctacaggtatctacattgtccgcagaagacagctcattgagatgttagagcggagtgctgatgagggaagatgggattttgtaacggatatcctgatccgttataagaatatgaagcgtatctatggttataagatgaaagaatactggagcaatattgcatccgtggattcttattaccagacgaatatggacttcttaaaaccggaagtcagaaattacttctttaaagaagaaccgggaattttctcgaaagtggatgatcttccaccggcaaaatataatgcaggatcagacgtgaaaaacagcctgatcgcgagcggatgtattatcaacagcaaggttgaaaattctatcttatttaagaaggtatttgtcggaaaaaattgtgtgatcaagaattccattattttaaacgatgtttatattggggataatacacacattgaaaactgtatcgttgagagccgtgatacattgaaagccaacacatactattgtggagagaatggaattaagatcgtatctgagaacaatgagagatatgtattatagccagaatcacagagttacttacagggtgacaaaaacttgcgttagatgaagaccgaaaagggggactgagacatcatgcagattacagacgtcagaattagaaaagttgaaaaagaaggaaaaatgaaagctgtagtttccattaccatagatgaagaatttgtggtacatgatattaagattattgaaggagagaaaggattattcattgcgatgccaagcagaaaggcagcagacggggaataccgtgatatcgcacatccgatcaattccgatacaagagaccgtattcagaaactgatccttgaaaagtatcaggaaacaatggctgtggaagaataagaactgcagatgagcgggccgctatggggatagcggctcgttttttgcttatgttgatgagaaaaatacacgcattcatgcagaaataaaagttgcattcttacttgccaaatccaaaatcttctgtaaaatagaacatacggaatagaacaatggaaattatttaatcatattgagaggaacagaacaatggaacagttaaaagcagtcattcttgcagcaggaaaaggaacacgtatgaaatctgatcttccaaaagtggttcataccattgagggaaaatgccttgtagattatgcaattgacgcggcagagggcgctggcgcaacagacatctgccttgtagtaggatataaaagtgaagtagtaaaaagcagtatctcccataaaaatgtaaaatttgcattacaggaagaacagttaggaaccggtcatgcagtaaaatgtgccagagatttcttaggtgaggagggtcagacattgatcttattcggagatacaccgctcatcactgcagagacactgaaacgtttatcagagcatcataagaaaaatggaaacaccgtgaccgtattgtcagcaatggttgatgatccgaccggctacggaagaatcatccgtgatgcagacggaaaattcgtaaagagcgtggaacataaagatgcatcaccggaagaattagagtctcacgagatcaattccggtatgtacatttttgacacaaaggaattgaaagaagctttggataaattaaccccaaacaatgcacagggcgaatattatctaccggatacacttactataatcaaaaacaaaggcttaaaagtggacgcatttgcgctcgaagatccggaagatatcacaggtgtcaacgatcaggaacagcttgcagcagccgctgcggtgatccgcggacgacagaacaaataacttgattcaataataaacagaaggagaacaggagatgtttttgatcgtaggactgggcaatccgaccaaacagtacgagaagacgagacacaatatcggttttgatgtcatggatgcgctggcagagaaatataatattagtatcagtgaaaacaagcacaaagcgctttgtggaaaaggcgtgatcgaaggcatgaaagttgttctggcgaagccacagacatacatgaacttaagcggcgagagcgttgcagaactgattaactattacaaattagatccggaatctgagctgatcgtgatttttgatgacatcagcttagagccgggaaatatccgcatccgcaaaaaaggaagtgcgggtgggcataatggaatcaaaaacattattgcaatgacaggcacgcagaacttcatgcggatcaaagtcggtgtcggagagaagccgaagggctgggatcttgcagactatgtgcttggacgtttcagcacggaagaccgtgcaaaagtcgaggaagcgatcggacatgcaatggatgcagccgtcctgatgatgcagggtgaagtcgacaaagcaatgaacgattataacagcaaaaagcaggagtaagcaagcagtatcagccgggcagagaggagtacagacaacgtgaaaacattcacagaacccaaagcgttcacggaacccttaaaggaactgcagggttatgaagagttagagcaggcactgaataaaacaacaggagtgatacaggtctccggttgtatcgatgccataaaaccgcatattgcatacagtgtcaacaatggttctggaaacagaatcattgttacttttcatgagcagaaagcgaaggaactgttagaggaataccgtttttttgataaaaaagcagcctattatccggcaaaagatattcttttttaccagtcagatatccgtggaaatgttctgacagcggagcgtatcaatgccttgaaaatgatggcagaggaaaaagaatgtaccattataactacgtttgacggtctgatgaatccaatgccaagcccggaaaagtttattcaggcagtgaaaaaaatctccgtgggagatatcgtcgaattaaatgagctgacaaaacatcttgtggaactcggatatgagaaaaactatcaggcggagacaatgggagaattttctgtgcgcggtggaatcatagatatttttccgctgacggaggaaaatccattccgaatcgaactgtggggagatgaggtggactcaatccgttcgtttgatccagagagccagcgctccattgagaatctgcaggaagtctatatttatccggcatgtgaactggtgctgacggaagaagaacgccggtctggtgtcgagaagatcaagaaagaagcaaaaaaagttgcagacaagttccgcaaagagatgaagaccgaggaagcctgccgggtgcagtctatggcggatcagattgccgaagaaacaatggaatatggcatctcagcgggactggatgcgtatctttcctatttctgcgaggagcgggtttccttattagattatctgaaaaaagaggattccattctgtttttagacgagacagtgcggaccgttgagcgcggacagtccacggaaacggaattttccgagagcatgaaacagcgtttggaaaaaggatatattctcccggggcagatgcgtgaacttttttcctgcaaagagatactggcaaagatcaatcagatgcgctgtgtcgcactggtcgcgcttgatatgaagtgcaattcgttgaacatcacagagcgtatggcgatcgagagccgcacggtgaatccgtataacaacagttttgaacttctgatcaaggacttaaagcgttataagaaaaacggataccggatgatcctgttgtcgagttcgagaacgagagcaaaacgtctggcagaggaactgatgaatgaagatcttccagcattttattcggaagattttgaccggaatttaagccccggcgagatcatgacaggctatggcaaggtgaaaaaaggctatgagtacccggcggtgaagtttgtcgtcatttccgagagtgacattttcggctccgaaaaaaagaaaaagaaacgccacagaatgtatgagggcgagaaaatcgccagctttacagacttaaatatcggtgattatgtagtgcatgagaatcacggacttggtatttaccgcggtatcgagaagatcgaagtggataagacggtaaaagattatatcaagattgaatatgccggtggtggaaatctttatatcctagcgacgcagttggaactgatccagaaatatgccggtgctgatgcgaagaaaccaaagttaaataagcttggcggtcaggaatggaataagacgaaaacaaaagtccgtggcgcggtcaaggagatcgccggggatcttgtgcggctgtatgcggcaagacagagcgagcgcggttttgcttacggaccggatactgtatggcagcgggagtttgaggagatgttcccatttgaggagacagaggatcaggatcttgcaatcgaggcgactaaaaaagatatggaaagcacgaagatcatggatcgtctgatttgtggggatgtcggctatggcaagacagaaattgctatccgcgcagcgtttaaggcggttcaggacggaaagcaggtggcatttttagtgccgaccactattttagcgcagcagcattacaataattttgtgcagcgaatgaaagattttccggtgaatattgatctgctttgccgtttccggtctgcgggcgaacagaagaaaacattagaaagactgaaaaaaggacaggtggatatcatcataggcacacaccgtcttctgtctaaagatgtggtgtttaaagatcttggacttttgatgatcgacgaggaacagcgctttggtgttacccacaaagaaaaaatcaaacagttaaaaaataatattgacgttctcacactgacagcaacgccgatcccgcggacactgcacatgagcctgatcggaatccgtgatatgagcgtgttagaggaaccgccaatggaccgtatcccaatccagacctatgtgatggaatacaacgaggaacttgtgcgggaagccatttccagggaacttgcaaggggcggacaggcgtattatgtatacaatcgagtgaaagagatcgcagatgttgcaacaaagatcgcagagcttgttccggaggcgaacgttgcttatgcgcatggtcagatgaaagagacggaactcgaaaacatcatgtataagtttatcaacggcgagatcgatgtgcttgtgtcaacaacgatcattgagacaggacttgatatttccaatgtcaataccatgatcattcatgatgcggacaatatgggattgtcgcagttgtatcagctccgtgggcgtgtaggacgttcgaaccgcacagcgtatgcgtttttaatgtataagcgggataaaatgttaaaagaagtggcagaaaaacgtctggcggcgatcaaggagtacactgagcttggcagtggatttaaaatcgccatgcgtgaccttgagatccgtggagccggaaacctgcttggcgcggaacagcacggacatatggaggcggtcggatatgatctgtactgcaagatgttaaacgaggctgtcaaagaggcaaaaggcatgaagcaggaagaaaacttcgacaccatgatcgacattgacattgacgcctacattccaatgggatatatcccaaatgaaatgcagaaacttgatatttacaaacgtatcgcagatatccagacggaggaaatgttagaggaactgatcgaccgtttcggagaaccgccgaaaccggtagaaaacctgctctacattgcaaaaataaaatcacttgcgcatgaggtttacctgacagaaatttctcagaaagccgacacggtgaaatttacactctatgagaaggcgaaactggatgtggcaaaaataccggaatttgtagcttcttacggcaataacctgaaatttgtcatggacgcaaaagcaccgtattttacctattttttcaagaaaaattccagagaaaaaaatgtggatgtaagagctgtgatcgacgctttcttgagtggcatgcgggaaactctgtgaaaaaagggtgaaaaatcttgcggcagcagtcaaaaagcactataataggaaaagcgactatccatgtatcaaaattcgtttggatagattaggaggaattatggttacaaagaaatttacaacgttgctggtaagcggtgtcttggcagcatctatgttagtgggatgtggcggtatcaataaaaatgaaacagttgcaaccttagatggacaggagatcaaattaggagttgctaattttgcagcacgtctgcagcaggctgaggcagatgatttttacagatcttattttggagatgaggtctggacttctgatctttatggaaacggtactacgatggaagaatccacaaagagcaatgtcatcggaatgatcgagaacttatatgtactgcagaatcatatggcagattatgatgtgacattaacagatgaggagactgcaaaaattgcagataccgctgcacagtttatggcagataatgatgaaaaggcgatcaatgcacttggcgcaacggaggacattgtgaatgaataccttacattagtaaccattcagagcaaaatgcgtacagcgatcatcgcggatgcagatacgaatgtcagtgacgcggacgccaacacaagtgcatatagttatgttaatgtatcgaaaaccagttataaagatgcagaaggaaacacgcaggaatatacagatgacgagaaagcagaacttgcagatacagttcagaaattccacgatgcagcagcagacacgacacttgatacagccgcagatgagtatggatatacggtgagtacaggtacgttttcatcagataataccacattggatgaagaagtgcttactgcattagagggacttaagaacgaaggagacctttctgatgtcgtagagacagacaattattactatgtacttcgtctggatgagatcacagatgcagatgcgacagagcagcacagacaggagatcatcagtcagcgccagagtgacttatataatgaagtgttacagggctggaaagatgacacagagtgggtattaaatgaaaaagtatgggaaaaagttacatttgataacttgttcacaacaacggtagaatccacagaggcagcagaagataacacagcagcagacaatgcagtgacagagaatactgagtcagtggatggcacagaatctgttcagtaaaaatacagacatgcaggataatcagggaatcatatcggttcaatggttatcctgttttttcttgtgaaatgctggcgtttatgttatcctaaaaaataaggcgaagacccgcgcgtttgtatgccaaacacgcaatgccgataaaataagcattttacataaacagtaagaggaatccgaaacaatgaaaaaagacaatatcgtactgatcggaatgcctggcgtaggaaaaagcactgtgggtgtcattcttgcgaaggtattgggatatgaatttatagatgcagaccttgtgatccagaaggaagaaggaaaactgttaaaagagattattgaagaagtaggaacagacggtttcatcgaggtggaaaaccgtgtgaacagctcgcttatggtggaacattcaatcattgccacaggcggaagcgttgtttacggcaaagaggcaatggagcatttgagaagtatcggaacggtgatctatttacagcttccgtatgaagaactggataagagattaagcgacatcaagggacgcggtgttgttttaagagacggacagactttaaaagatctgtatgaggagcgtgttccgttatatgaaaaatatgcggatgttgttgtaaatgaatacggtctgaatgtggagcagaccattgataaaattttaagtttgaggaatgaagcaaaatgcaaaaaataaagttgacgaaaaaagttatcatagaactgctcgtgatagcgggtctatttttggtcttattgttttttgcggtttcacaaaagataacaatcggacagaaatatcagcaggtttattttaatggtgaattaattggaaatgttgcggtacacgtagatgtagataaagcagtacatgaagtgaggcgcgaacttgcggcagagagcgcagatcctgtgtgcatggattatgaatattcttccagcaaagccaatgattggtttaccccgctgttcacagaagatgcattaaaagaggccttaaaggaaaaaatgagagtatcagaaattgaaacgcaggtgagagcctatacggtggcaatcgaaggctatcgcggcaatttcaaaagtatggacgaagtgacagaatttttaaatacagtcaaaaatgagactgacacagagggacagtttacaacacaggtttcgaaagaagaaggacatataagcggtatctacagtgcgcagttagcgacggttgatccaaaagaggacacagaagtgatcccggaggaaacattggcagatcaggtgtccggtggtgtaaatggtgcttttacttaccagatggaatatgccatggcaaatccaaaagacgacagttacgagaccggaacactggatatagaatttatagagagtgtagaagtatacgaaaaatatattgccgaggatgcactgtcggatgtggaaacacaggtagaggaagtaacaaaagaaaaagaaacgaataaaatatatgtagtagagagtggtgatgtactttctgtgatcgccatggatcatgatacaaccgtagcgaatatcatgacgttaaatggatttgacaatgcagatgtaagaatctacccgggacaggagatcatcattgcagtaccggaaccggacttaagccttcgtatcaaaaagggtgaggtttacgaggaagattacaacgcagaaccgaccattattaaaaatgacgaatggtatacgacaaagcaggtggtacatcaggaaggtacgaccggacacagagagcgcaacgatatcgttacctatgaaaatggaatcgaagtcgcaagagagcttgcacatcagaccattatggtggaatcaacaccagcaatcattgagcagggaacgatcacaccgccaacgtatatcaaacctttggcaggcggacattttacatctggtttcggacgccgctggggaagaatgcacaaaggtgttgactggggctgcccggtaggaacaactgtttacgcatccagcgcaggaaccgttgtcagtgccggttacagcaaaggatatggtaacaatgttgtcatcagtcatccggatggcagaatgacacgctatgcccacaacagtaagttactggtatcagcaggacagtgggtagaacagggacagagcattgcactgagcggaagcacaggaagatcgacaggaccacatgttcatttcgagatatacatcaatggagttgcggtaaatccattgaattatattggtcagtaatgttataatcagaaaaagaaccgcttgacaaaaagatacaatggttactataataatgtgtttgtatgcaaccattcgataagtctgtaagttgatggcaggcgggacgaaaatgttcatagaggtgtaatatggaacagtatgtgattaaaggtggaaatcctttggttggagaagttgagattggcggagcgaaaaatgcggcactggcaatcctttctgcagcagtaatgacggatgaaactgttacgatagagaatctcccaaatgtgagagatataaatgtattattaaatgcaatccaggagattggagcaaaagtagaccggattgacgctcatactgttaagatcaacggatcttttatccgtgattttaatgttgacaatgagtatatcagaaaaatcagagcatcttattatctgatcggtgctttgttaggaaaatataaaagagcagaggtggcacttccgggtggatgcaatattggaagccgcccgattgacctgcatttaaagggattcagtgcattaggtgcgcatgtggatatcaagcatggacttgtccttgcatccgcagaaaaactgaccggaacccatatttatctggataaagtatcggtcggagcaaccattaatattatgatggcagcttccatggcagagggaaagaccattattgaaaatgcagcaaaagaaccacatgtggttgatgttgcgaatttcctgaacagcatgggtgcacagatccgtggtgcaggaaccgatgttatcaggatcgtaggtgtggaaaaactccataagaccgagtattccattatcccggatcagattgaagcaggaacctttatgtttgcggcagccgcaaccaaaggggatgttacagtaaagaatgtgattccaaagcatttagaggcaaccacagcaaagcttttggaaatcggctgtgaggtggaagaatttgacgatgcagtgcgtgttgttgcgtccaaaccgcttcatcatacacaggtgacaacacttccataccctggtttcccgacagatatgcagccacagatggcagttgttcttggaatttccgagggaacaagcacggttactgagagcatttttgagaaccgtttcaaatatgtagacgaattgacacgtatgggtgccaatattaaagtagagagcaatattgcaatcatcaatggaactgaaaaatacaccggagcaagagtgaacgcaccggatcttcgtgcgggtgcagcacttgtcattgcaggtcttgcagcagaaggtattacagttgtagatgatatttactatattgaacgtggatatgaagaatttgaatccaagctggcttctttgggtgcggtgatcgaaaaagtgagcacggaaaaagaaatccagaaattcacactcaaggtttcttaaaacggaggctgactaggtaatgcaggcagattttatggctgcgttataggttatgaagggcagatataagagtccatacacaagtcaaattattagtatatataaaagaaaatcgtacaaacgaaatatgatgttcctgttcgcagagctcacaaaggaaatcatatttgtttgtacgattttctttttatttacgcagtgactgacttgtgcacagactttatatctgccctgctttacgttatgaatgtagccataaaatctgcctgatttgctgaaatatccggctaactttccacattttacaggcattcctgtctgttcattagtgaaatgatatgtgaaaggctggtgggaagccagaggatattttaatataagaaaatcttaataatttcttgttaatttcttatgcaagtatttgaaaacttgtatgagaaatttgttatattaaacttaaacaatatagatgtaaggagttgaaaagtatgtctgaaaagatattgattatagatgacgagcaggatatagcggacttattggaagtctatttaaaaaatgaaaattacacagtttataaatactattgtgctaaggatgccatgccatgtatcgaaaatggcgatattgatctcgctattttggatattatgcttccagatatggatggtttttcactttgtcagcttatacgccaaaaatacacttatccgattatcatgctgactgctaaaattgaggaaacagacaaaattaccggtctgacattgggagctgatgattatgtaacaaaaccatttcgaccacttgaagtggttgccagagtaaaagcacaactgagacgttataaaaggtacgcacttgagacgattcctgaaaaagtttcctcaacgctttcatacaataaattaagtctgaatgtgcagactcatgaatgtttgttagagggagaaactatttcattaacgcctacggagttttctatcctgcatgttcttttagcgagtgccggaaaagttgtaagcattgaggaattgtttcattcagtatggaaagatgaatattactctaaaaacagcagtacaattaccgtacatatccggcatctgcgtgaaaaattaaatgatacttccgacacaccacaatatattaaaacggtttggggtattggttataaaatttagaaaaaaggagactgacaatgaagaaaaattcaaaatttctgatacttattctatttttaatttatctggtactcttggtctggatcatactgttcaaattgcaattctcaatcaacgatttggacaagataagaagtgtgaacttcatgccattttactatgataaggaaattggagaatcatttcacttaaaagaggttcttgaaaatgttttaattttcatgcctatgggcatctatcttcaaatgctcttgtcaaaatcaaactactataaaaaactgatgataattgttggaacaagtttactattggaaacagcgcaatatgttttagcaattggtgtatcagatattactgatatacttacaaatacagcaggaggtcttttaggtctgattttatattctatgattgctcatttacttggaaaaaaagaaaaaacaaatagactgttttcgattttgggactcattgtaagtgttattgtggttggaatgcttggatttatcctgtttgtaaatcagtaggaggtacaatttttatgttggacaaaaaaaacacaaccgaaaaacatcttagagtatgtctgttcctatcgttgctgatttatgctgttgcaggatatattatgacgctcctgttggattatattttttcaaaattcaacaacggtattctggcatggttctacttgcggatagatgtttttttcatactctatttggtgattggctttgtatatatcttcaaatattattggaaaaagccatggaaatatctggatgaagtgattacagcaaccacaaccgtttatgagcaaaatgatcattctgtaattttatctgaaccgctgaaagaattagaggagcagctaaatcaaataaaaatgtctatactgttaagtaagcagaccgcaaaacaggctgagcaaaagaaaaatgaaattgtcatgtatctggcacatgatatacgaacccctttgacaactgtaattggttatttgagtttgctccatgaagcacctgatatgccaaatcagcaaaaggaaaagtatgtaaaggttgcgttggataaggcagaacgtctcgaaaagctcatcaatgaactttttgaaatcacaaagtataatactcacacggtcgttatccaaaaagagcatgtggatttacactgcttgattgcacaggtaattgatgaaatatatccaacactctccgcaaatggtaatacagcagtatttacctcggaagatgatttaactgtcgaggctgatcccgaaaaaatggcaagggttttcagcaaccttttgcgaaatgctgctgcatacagttaccccaaaacagaaattcatatatttgctaaaagattcctacatgaagttcagattacttttgaaaatcatggaaaaacaattccaccagagcagataaagagtatattcgagaaattcaatcgtttggatgaagcaagactttccaacaccggcggtgcgggacttggactttccattgcagaagaaattatacatttacatgggggaacgattactgcatccagtaaaaacgaaatgatagattttgtaatcacattgcctacattctcttaggaaaaatagaacatactcttagtgattacttaggaaattaaatgtaaattaaagaaaaatcgtacaaacaaataggatttcctttgtgagctttgtgaacaggaacatcatatttcgtttgtgcgatttttctttataataaccaataatattgacttgtgtgtggattcttatatctgtccttcactacctataacgtagccataaaatctgcctgcattatccagctaaccactggtttacaacaccgactggatatgcagatccggttgtgccgacagatccagacagcttccgtccattaactggatgatcggtttcgataagcggtttttatttaacatgacaatatttgcaacacgtccgtcattgagcagcacacggttattctgataagtgcttgcaatgtgtgacaaaaatgtcagaataaacttcggattgtacttggaaagaccatcatgttcaaaattgttaattacctggaagacacagagcggtgcgcggtaagagcgcgcagcggtcatggcatcgtatacatctgcgatggaaacgattgccgcatattcatcaatatcggattgagacaaaccagttggataaccgctgccgtcacttctctcgtgatggcagagaactgcttttttcacgtgagagtctaatgggagtgattttaatatgtcataaccgaattttggatgctgttttacaagggcgaactcctcgtcggtatactttccgggtttatttaaaatctcgtttggaatctttaacttgccgatatcatgtaaagcaccggcaagcgttaatgtatccaattcttccggtgagaactttaaccagcgtccaagtctgcggctgatcagtgaaacattcagcgaatgagcgtaaacagagtcctccacggaacgcatattgtggagcatatcaaaaagctctaaggatgttttgcaggaataatataattccctggtgtcagataaaagctgttcgtagtccagtggcttattgtggaacacacagtcctcaagaacagtgcggtaggtggcgatcaccttagaataagaaatctggaagtcctgaaactctttggaacggacaaccttctgtgaataggaaggagcctgagcttccggttttacaatttgaggaggaacttcgaccttttcctcttttttctcagtaaccacaggatcatcagtgatcataacctgtgaaattacataaaatttgatacgggaaatgagacggtctgtgagaggaactccattttcaacgatcagctgaccgcctctggtgcgaacttctccagcagtcaccattcctggtactaattcatctgttggataatattttgtcatttgcataccccaatctatacatttctataaaaatagtatatgtttgcagaaaatgaaagtcaacagtaactatatacattcgggcaggtttgtatatcgttttgaaaaaaaccttgacagagaagcggttagagtgtatcttagagcaagtgagattgatacggctattcgttcagtccacagagcagatttgaaaattcaatattgtgtcaaagtaattagaatgtaattacataaaattttcttattcagagtgatggagatacataggatctatgaagtcacggcaacccctctacggaaggtgcctacctgagcgagcaaattagttggatcgaaggtccaagactatatttaatagttcgaacaataagaggatttgataatctgatgatttattaactccgcttgttcgagacagcggagctttttttatggaaaaattgcaatgagatgtttctgtaaagtaaaaacgctttgttgggatgcgggagtacgcagacagattgaacatggcggaatacactacgataacgggaaatttaccaccacaagaagaaaggaacgaacaaatggaaaaattattattcacatccgagtccgttacagaaggacatccggacaaaatgtgcgatgcgatctctgatgcaatccttgatgcatgcatggaacaggatccaatgagccgtgtagcctgtgagactgcaagctgtacaggatttgtacttgtaacaggagagattacaacaaaagcacagttagatatcccttcaatcgttcgtaaaacagtaaacgagatcggatataacgatgcaaaaacaggttttgacggacatacatgcgcagttatggtagcactcgaccagcagtcgccagatatcgctatgggtgttgataaagcattagaagcaaaagaaaacaaaatgtctgatgagcagttagaggcaattggtgccggcgatcagggtatgatgtttggttatgcaacaaacgaaacaccggagttaatgccgtatccaatttctcttgcacataaattagctttacagcttacaaaagtccgcaaagacggcacattaaaatatttaagaccagacggaaaaacacaggtttccgtagaatatgatgagaatggaaagccaaagagattagaggctgttgtattatctacccagcatgacgaggatgtaacacaggaacagatccatgaggatatcaaaaaatatgtatttgatccaattcttccaacagaattaatagatacagagacaaaattcttcatcaacccaacaggacgttttgtgatcggcggaccacacggtgatgcaggtcttaccggacgtaaaattatcgtagatacctacggtggatacgctcgtcacggcggcggagctttctccggaaaagactgtacaaaggttgaccgttccgcagcttacgcagcacgttacgttgcaaagaacattgtagcggcaggacttgcagacaaatgtgagattcagttgtcttacgcaatcggtgttgcacagccaacctctatcatggtagatacttttggaacaggaaaactttctgatgaaaaactggtcgagctcgttcgtgagaactttgatctccgtccggcaggaatcatcaaaatgcttgacttaagaagaccaatctaccgtggaacagcagcatacggacatttcggacgtacagacttaaatcttccttgggaagcaacagataaggcggaagcattaaagaaatatttataatcagcgttgagcagattaatttatgaaaagtttagaatctttttcggaaaatgtcataggatttcggatggttcatgctataataggtcatagggtttatccctgtggcctatttttgcgatataatgtacgcgaaggcaaaagtgagcatgcgatatatcatggacacgtatgtttgcatgccgtggacatgatatatgcatgtgaacgcgcccgcgagtcaggaaaaccgtaggtttttctgacttttgccggagcatattttgcacatgatataatgggcaaaaagatagaaaaccgttttcatagaaggaaagcatatgaagtttaagaataaaattattatttcattctgcatcattatttttgtgccgattttcctcgcaatgctggttttgttcagtatgcagcatatccagatgaaggcaatcgagcagacttatggtgtggaaggggaaggatacagctatttttctaattcggtgcagcttttgagcagattcacgcgggagatttatcaggaacttcaccaggtgtcggacaatcagcctgagaagttacaggatgaagcgtatcttgaaaaagtaaaccagcagttggaggaaaaagcatcttatctcattgtccggaagggacaggaactggtatatataggaaaaagtgcaggaacgtcacttttgacggagcttccagaatatggaagcgcggataacaatgcagattccggtacttatatggatggcgacgagcaggcactggtaaaacagattgattttatctatccggatggtacaccgggaagcattttcatcgtgaccaggttagaagaaatggttccggaattaaaaagtcttctgatcgatatcatggtttctattgtgctgatccttgtgctgacggcgtgtatgctgacggtctggatttatacaagtctgatcaatccgataaaaaaactgcagactgcggcgcagaatatcaaagagggaaatcttgattttacgatagagacagaaagcaaggatgagatcggcgaactttgtaccagttttgaggaaatgcggcagaggttgaaagacaatgccgaagagaaaatcaatagcgagaaagaaaataaaatgttgatcagcaatatcgcgcacgatctgaaaacgccgatcactgcggtaaaaggatatgcggaaggattgatggacggtgttgcggataccccggaaaaacgggataagtatatccgaacaatttataataaagcaaatgagatggatacgcttatcaatgagctgacgctctacgcgaagatcgatacgaaccgtataccgtacaattttgccaaaatcaatgtgggtgaatacttcaatgactgcattgaggagatcggactggatcttgagtcaaaaaatatcggactggcatactttaattatacggatggatcgacacagatcattgcggatccggaacagcttcgcagagtgatccacaatattattggaaattccattaaatatctggacaagcagagagggcttatcaacatccgtatcaaggatgttggcgattttatccaggtggagatcgaggataacggcagggggattgcagcagcggatctgccatacatttttgaccgtttctaccgtacggatgcttcgagaaattctgcaaccggaggcagcggaatcggattgtcaattgtgaaaaaaattattgaagaccatggtggaaaaatctgggcgaccagcaaggagtccatcggaaccgttatgtattttgtgatcagaaaatatcaggaggtgccaaatgagcagagtattaatagttgaagatgaagaagcaatcgcagatcttgaaaaagattatctggaattgagcggatttaccgtagagattgagaataacggaacggcaggattgaaaagagcattgtccgaggaatttgacatgttcattttagatcttatgcttccgggaacggatggatttgaaatctgcaaaaagatccgtgaggagaaaaatacaccaattcttatggtttcagccaaaaaagatgatattgacaagattcgtggacttggacttggcgcggacgattacatcacaaaaccattttctccaagtgagctggtagcgagggtgaaagcacatctcgccagatatgagcgcctgatcggaagcagtgaggcgaaaaatgatatcattgagatccgtggtatccgcattgacaagacagcacgccgtgtctgggtgaacgacgaggaaaaacagtttacaacaaaagaatttgatcttcttacctttttggcagagaatccaaaccatgtgttcaccaaagaagaattgttccgggaaatctgggatatggaatccgtcggagatattgcaacagttaccgtgcatatcaagaagatccgcgaaaagatcgagatgaataccaacaaaccgcagtatatagaaacaatctggggggttgggtacagatttaagctgtagcagagaggaataacatatagtatatggataaacctgagataattatttataaaacagaagatggtgggttagagcaacaatcaacaatgagaaaaatcggaaattccgaattttctaccaaacctacaaactattataatctggatatggttatttcggtggggtatactttaaagaacttcttgaaagaattcgtgatattcgagcttctgaaaaagttttttatagacaagttcttgaaatatatgcgacaagtatagattatgattccaaggcagaagaatctatcgcattttttaaaaagtacaaaataaaattcattatgcagtttcaggagaaacggctgcggaggttatccataatagagcagatgccgaacgtgaaataccaatgactatgaccgactggtcaaatcatttggatggaatacttacatccacgggtgaaaaattattgaaaggaaatggaacagtttctcatttacaggctatgaaaaaagcagaggatgaatataagaagtataaagcaagaacaattagtgatgttgagaatgattatcttaatagtattgagatgatagaatcaaagtgtaaaaaaaatgacaggtatataacaagaagcaatgtgttttacggcacattgcttcttgttttataaaggctttctagctttgattttcgtaaattctatgatttctttcttatcttcatcagatatcttatcaaaataaaaaagtaattcccgttccaaattcgtattaaacatatattttttcttgttcgagggatcattaaaaaaagcaagaaattcggataaatctgtgctcgcctgcgttggagcaggtgcatcatacgattcttcccggtcaatatcaattgtcaggtgcaaaagatcatcaaccgagatgttgtaaagtcctgctaatttataaaaaacttcggcatccggtgtccgtttgccggtttcgtaatggctgtatgtctggcgtacaacgcccaatacctccgcaacataatcctgcgtgtaattattgactttgcgtaattcttttaacttctgtggaagtaatttgttcttcatataaataccacctttgctcttagtatattttttgttggtgccttggatgtagcaaggtgtagcatatcagacaacaaaagttaaaatattaacactaatctacactacaattgtaacaatctgttgcggaaaaaataggatcattatggattatttacaaaatatcaacatttatgcatatggaaaatagattgtttattgttaaaaagtaacaaagtgtagcaaaatgtaaaaatagatgttaacaaactgtagcgaaaagacgatataaatgatacaaaacgtagcaaatggaattgcgatgaaaacaaggaggctaaatcctctcctcaccagaagggcaaattttacttcgtaaaattggattttgcttcgcaaaacaaggaggattatgttaaagatttcactgaaacaaggtcagtatgtaaatatcggagataacatccgcgtagtttatgtgggtggaacaggaaatcatggaaggcttatgatcgatgctccaaaagaggtcaaaatcgcaaggagtaccgtagaacaaaatccggagcgcaggaaagatacctattatccggaacctgcgatctcaaaagaagcacaggacgagatcaagaagattttatggaatgaacgcatgaaagcggaaacaaaaaaagatgcagaaagaatgagccgttaagctcattaaaaacatcgcacaatcatctggtaatagacagggcacaacccgggatgctttgtttgttataaataatgccggaaaaggaagtccggtcaaaaaaacataatagctcatcaaaaggatgagacaaggaggattatattatggtagtacaacacaatttacaggcaatgaatgctaacagaatgttaggagtaacaacaggacagcaggcaaaatccacagagaagttatcttctggttatagaattaaccgtgcagcagatgatgcagcaggtttaacaatttctgaaaaaatgagaaaacagatcaaaggtctggatcaggcatccacaaatgcacaggatggtgtatctgcagttcagacagctgagggggctttaactgaagttcactctatgttacagagaatgaatgagttggcagtacagtctgcaaatggaacgaatgcacagtcagatcgtcaggcgattcaggatgagattgaccagcttgcaacagaaattgatcgtgtctccgagacaactaaatttaatgagatttatcttttgaagggtaattcacagacagctgcaaagtctaccttcatgcaatctggctatgctactaaaaatggtgtaaacttttatagagaaggtgctgtagcggcagataagttgactggtgatgatttgaaaaaagcgttagcatcaggagaaaaactttataccacagcggcagctaaagccggagataaacaggatgctggagatcttgcaataaaaggtaaagattatgactatgtcactaaattatatgatgaagatggaaaagaagtatcagcagaaaatattttagctggtatgaaggcggatggaaaaacggctgctaacagttattatactagtgacgctggaaaaaaaggtaatgatgctggacaaaatgttgctgttgctaaagatactgctgcgaaaacagacggaacaggttttttacagcagtttaatgtaaatggtgagctttcctttaaccttcatgttggagcagattcagcaacaaataataagattgcagtcaacattgaatctatgagtgcagcaggaattggtgttaaaggtcttaaagttgacacagaagatgatgctacagcagcaattgaccgtattgcagaagcagtggcaaaggtatcttcccagcgttccgctctcggtgctgttcagaacagactcgagcatacgatcgataacttagacaatgttgcagagaatacaacagcagctgaatcccgtatccgtgatacagatatggctgaagagatggttaactacagcaagaacaacattcttgctcaggctggacagtctatgcttgcacaggctaatcagtctactcagggagtgctttctctgttacagtaatttgtgtaaaattgtacaaaaaagaagctcgcagtttttgcgggcttcttttactaagctgtgtgtccagcgaagctggaccacactagccggtgtaagtccggtcacggtaatcgccagtgagccgtgtagctaaactcggtgcgttgca

SEQ ID NO: 14332 - DNA, 7046 bp, Unknown
  gut microbiota DNA sequence
agcgaaagcgtgttttcgaaaattttgttgattttgaacaattaaaagaagattatgacgagttttgcaattatctattttttcgaagcactaaaaaagccccaagccaatataaaaatatcagcttagggcgaactatctgtccgtggtaccacctaatttcggtaaaaccgctctcgcgcatacaggaaacttccgatatgccagctctgtaacgggagcacccgatgaagcttaataatgaatcccactgctttctggcatctgatgccgtccgcagttctaacatccacgttcacttcacgctcaaagacaggttccgttttcatcatgaaaggctcgcaccagccgcctcctctctgtacatcataaaaaacgtactaactcttatcatcgctttcacataatcgtaaactgcaaagcagttacaattgacttttcatactatgttggagaataacacttttttccgccgaagtcaactatatttctgacaaaactggctgtttgaaactctgcaaatgattacatattccccaatattttatataaaattttgtaaagtgatgctgcctcttcctgatcaagacagacgcacccaccaaccttttgcggaatttccacggctttatctcttaacttttcaccctctgtggtgagcgtgacgatcaaaactctctcatcctcttttgcccggttccgttttacccagcctttttgttccagcttttttaaaaccggggtgagtgttccggagtcgaggtacagatgttccccgagctccttcacattcatctccttatgctcccacatgaccatcatggtaatgtactgtgtgtaagtcagatccagttcatccagaaatggcttatacttttttacaatttcttttgatactgcatacaatggaaaacaaagctgtttctccagtttcaatgcatcatatttttccatattgtcatcctgttgcccttactgtggtaagcgccgctttctttctgttataactgttttttaataaattctacaatattttcttttggagcgaaacctacctgcacatcgaccttttcaccatttttcaatacgataagtgccgggatattcataattttgtactgcattgcgagatccgggttctcatcgacatccacattgaaaaagttcacttttcctgcatattcctcggaaacttcctctaatacaggtgctaacattttgcatggtccacaccatgtagcagaaaaatcaataactgctacctcacttgctgttacttcgttaaattcgttctgtgaaattttctttaccataattttttctccttcttatcatttactttgacaggcgttttttctctgccagatatgcaactgcggaaagtgcagctacattgccctctcctgcggacttgatatactggtacggtgcgccgaccgcatcgccacaggcaaaacagcctgcaaggtttgtgcgcatctgacggtcaacctcaatatgattgtcctctatcttaagtcctggcactaactgtgccggagaaacgctctctcttaaaaaaaatactccatccacatcataacggttccgatctgtcacaagctcctgaacttttaacgctccctcgacagccaccggcttttcccgcaaaacttcgatggaatctgcaacatttacatcggcttcatacattggaatataataaactttgtctgccatctccgccataaagtcggcttccgcttcctcttttggtgaaaaaccgatgatggctgctgtttttcctctgtataaaggtgcatcgcaggtggcacagtagctgacacctctgcctaaaaactgttcttcccccggatatgtctttgctgtgctgactccggttgcaagaatgacggtctgtgcctcatagtttgttccatttccctgcaaggcaaaatactcacccatcgcataaactgcgttgatcctgtcttctgtgatctcaatctccatcgcttttaaatgtgcttcataagcagctttcagttcctcaccgccaatgtctggcaagccgagataattctgaatcgtatgcgctttttccactttcaggctcagatttttatttccaaataaaataatcttcttattgcggattttcgctgtgatcgctgcctccagccctgcaggtccggtgcctatgatcgctatatcatatcgttccatctgtacctccgtttctgtcttcattataaataattgtttttgttattatcgtttcaaattaaattgtgcacaatgttttctttcgaaatgaattgtacacaatttaattttatttgtcaatatattttttgcactttttattttttttattctttccactaaaaaccgaagtcagcataatcctccggcaaaaatctgtgataaataatgtggcatccctcatctttaaaacaatagtaatacggatcttctccgtctccttcaaagcggatcataagatcaaactctccattatccatcggctccatctgaacctgttttccctttgagaggaaaagatctttcacctgctgcatcgtacagccgtgttttccgaccagctctactaactcccggataaactcattcggcttcatatgctcatgcacatattctgcgccctgctccggtatatggaaacagaagcgatcccctttatgagagaccagtacattccccagtttttcctttgtatatgcaccaaatcctgccaggatctttttcatctcctctgcatccgcctctgtctcaaaaaagtgatccagggagctgagcggataatacaaacgaatctcctctttgcggtatccaagttttgcctgctcctccttgatcacatcaataatactgttttctaaccgatgatacgtcatatatcctccttgcttttcgagcaaaatgtctggcgaaaaaattcccgccagacattttttattccttatagttatcatttacatatttctgaatggccggactgtcttccggcatacggcatcccacaatatattctccgtgattgtccgtgcttctgatcaccacgccttccatggtgcgttcctcttttaccggaaaatccggaatatcgagtatcagctgtgttcccttaagttccgcaaaatcgtctgatgctgctgcaaatgcaaagccattcgcactgacattgaccatttttccgcaatatgttttatccgtatcttttctcgtgatcgtacaggaatttgcgatcggcattctcggatattttcttctgtttgcaatgacaggtgttgtttttaccactaaatggcatacatctcttccctgctcattttccacgtttgccagaacatccgaccagttgtaaaggacattatcaaccacgatctgaatatcatatggtgtcttttcccggatgctgcccagtgcctcccgatccatctgaagccataactcgctgccattctgtcttacgacttttccatgatactcttcccgtgtttctccttttctgaccaaaacacagtgcatctgcggtttgacatcctgaatacccataaagccaccgacacctagtttttccatcatatcctgaacaacggtctcgatcttattcacattgcgtgaggactcatcgtatttgttcagcattgtctttgttgcgccatctgcacttccaatgctgtctgtcatggcatccatgacattacagattccctccatattagaaaccatctgatggttggattcttttacatcctgcattgcggaatcaatgacactcagatgctgttcaagttccgctgcatcttttgcaattcctgacacactctcgttgaccgctgcaactttttcagaggtctcctggatcagattgacggtctgtccgatagaatctgtcatcttaacggaagtagttccaagatttgcaagtgccgccatgatacggctcgaagactcctgcgtctctgtacttaagttccggatctcatctgctacgactgcaaatccttttcctgcatctcctgctctcgctgcttcgatcgatgcgttcaatgccagcagattcgtctgggagttaatggattcaatggtgctgacttctgttttcacacgctcgaactctttctggaattctgagagaatcgtctcaacttcgtcggacagctttgccatcagcattgttgtctctgccactctggataattctccggagctttcatttgcatggtctgcggattcgttcatcagagtgaccatctgttccatcagggatgccatgcgttccacctgctcattgatgttggttgtcatgtccatcgaggacattgtcttatcatgaaggacgttattgttctgcgtcagttcactcattccctgcacaactgtcgtggaactctgtctgttttcatcttctaattccctgacaaccgtaactccgtccatgatctgattaccggcaccttttacctgctcaacagtcgtaaccacccgctctaaatccgctttgatggaattggtcaatgcaccgtctgactcattcagatggtcgatcgacacaacatagcagatataacagagtatgatacaggatgcctgcaatgtgtaatcattcacattggatgcactgttcattccgttcataaatttatgtacactgctggcaatactgatcactaatgtaccaatgccacattgcaccatatacgtcctgtctttgaacaaaaccagcatactcgtcagaggaaatatatacataaacgacagtatcgattcactcgtacagacaacaaatgcataaaacacaccatacccgaccgcaacaataaatttataatactgcgttgctgctccctgcagacggagtaccaccaccccaaacaaaaacgggatccagcagaccgccataaacattgcatagtaagacagcgtatgtaatccctttgccgtatctgacgtgtacgacagtgaaaggatcaatgacaatgccatccagacattgcgcgcctttttgtttgccttcatcttaaatacttgtgcatcatattccattcccttttatccccgctttcaaactgacaaaagctgtttttcagctatttgtttttttcctgctcttcttttgcattgtcgagtgcgatcagttttgaaatgatctcctcacagatctgtgtcacattcttgccatctgttgccaccgtaatatccgcaactgcctcatagcgctcttttcgtttatccatcagactgctgatgaactccacattcatatgatcatttaaaatcgggcgctcgtcactgtccttgacacgctcatagatagtctccggtttcgctgtcagtaaaacaacacggccatttttcttcatatgatctgtgttctcttccctcatgacaacaccaccaccgcaggaaacgattgtctgctttctcttctgcagctcgatcagtgtattgctctctaagttacggaaataagcttccccatactcatcaaaaatttctgagatagacataccctgtttctccacgatcatctgatccatctcgacacggtccatttccagcttgtcctttaactcgccggcaatggtgctctttcctgctcccatgaatccgatcaggaaaatgttgtaatcaaacaggctctttgcctggattcttctgctgttcttcatgatatacttaaaaatatcaagaatctcttcctcaaactcattatcgccgagttttgcctctaatgcgtctgtctgtttcttctcctgctccggctgtaaaattgggataccggttgccttcttataagaaataatctcctgaatatgagacattctgactgcaagctgttctataatgatatcgtcacattctccgatctttgcacggatttcctcaattctgtccatctttttctaatctcctcgctgtacttattctatcgtaaaaccgctgtcttttttacaatttccgctctcagtatagcaagttcagaaacattgcgcaagaaaaatattttagtacattaaagcggaaataattgcctgttttcatactaaaaaagccattatttccgctctgcaaatatgatttggaattactgcagctcctcctgcatatctccaagatacgcatcaataatctcctgtgatacagaattttcgatcgatgcatatattggtttacataatttccttatctcattataaagttcttcactcggtgtgatgatctccgttccgctctcgcggatcgtatccattcgggaagcgatacgggcatccgactgctctcttgcgtactctttcgccgtatctgccgcctctttaataatctgctgctgctcatctgtcagcgaatcaaaaaactcctcactgacgatcagcgagatcagatgcggaagatgatttgtctctaccacgtaatcctgctgctcatataatttattggatacaatgacctcatatggattttcctgtgcatcgatcgttccctgctgcaatccgatatacacctctgaaaatgtcatcggtgtcggacttgccccaaggttcttccaatatgccatatgataagaattttccatggtacggatcttctgtcccttaaaatcagaaagattctccacttttttatttgtcgtcataacacggaatccctgatctgcataacctaacagctcatatccgccatcacggtacacctgctgcatcagttccataaattctggattatccacatgttcccggacttcatcgattgtctcaaacagcgccggcatatcaaaaaccgctgtgtctttcataaaagtaacctgcggtgcggtattctgcaccacaaatggaatgtcgccatccttgcacgattctaacagttcacggtcaccgcccagtacactgttcggatagacattgattttcatactgccgccgcttaaccgatccacttcctctgcaaacttttctgcataaatctgtgtcaccgtatcctccggacttgaacttccaagcggccatgcataacgctgtacttcgctttcttttgcattc

SEQ ID NO: 14333 - DNA, 5848 bp, Unknown
  gut microbiota DNA sequence
ttcttatcatgtgtattctcctcctgcatttgtttgtaactattcagagccaaggcaattttcataaatttgcgaatcatgcttgcatgaatgagcataattttgaaaatttctttggcgaagtaaccacatgagcaaaaggaaagctctgaaagagcggttttgcgaatggggttctgaatagttacatatggcactttaccatttttttcattttatcacagcgttcacccaaaacccggatttcggcgtgagttgtaattatatggcgtgaattgtaagatgcaggcttgctttggttttccgaattttttataatggatgtatcataactgtgaaacaaggaggactgccacatgctgcttcagattttaacttatacacaccacttaacgacaatgctgtttggcatttttctgtccgccttttttctcggtgtaaaacagaataagaaaaatgtctgcattcttcttggcggtggagcagtatccggacttttctttctgatctgcaatacggtattcggttcgttgttcacagaagccgtctatccgcttttcgtgcatctgccgctttttctgctgctggtgttttattaccgtttccgctggctgccttccataatctctattatgaccgcctatctgtgctgccagttcagcaactgggcaggtatttttgtcttatccctgagcggattggactgggtttattaccttgtaaggattatcgtgactgttgccgttttcgctttcttaagccggtatctgtgccagactaccgcactgctttttgcaaaatctgaccgggaactgtatatcctcggggcgatgccatttgtctattatgtgtttgattactctaccacaaagttctccatgcttctctactccggaaataaggtggtcgtggaatttctcgcatttgccatgtgtatttcctatgtcatttttctgtttgtctattttcaggaatatgagttgaaaaaccgcgctgaacagtacggtcagcttaccaatatgcagttgaactccctgcactcggagattgagcaggtccgcagcagcgaacaccgcatgaagatcctgcggcacgacatgcgacatcatcttgccgccatccagacttttatctcccagcaggaaccggagcgcgcgcttgattatattcaggagatcaataagcaatatgacgacacggtcattcactctttctgcagaaatgagctgctgaattcggtcctttccatttaccagacacggtttgtggaaaatcagatcgtttttgacgtacaaatccagacttcgcagacactctgctgctctgagatgactttctgtgcgattctttccaatcttctggaaaatgccatgcatgcggtcacgaagctccctgaggaaaaacgtatcgtgcatctgagcatttttgaaaagggaaaccaccttctgatcctacagaagaatccggcttcagagacacctgttttttcaaacggtatcccggttacaacggcaaagaatcatggtatcggtgtccaaagcgtcatttattatgtagagaaggaacacggacagtaccagttttacatggaaggtgaggactttgtagtccgcattattctttaagcgaggaaatttattatggtaaagattgcgatttgtgatgatgaaactgaatttttggatctgctttcagacagtcttgattcctggtgccgggcgcatcagctgacactgcagctctaccggttcacaaacggtgacgaactgatctccgcacacagggcttatggcatggatctgatcctgcttgatatgatcatgccccttttgagcggcatggataccgcccgcgaactgcgccagcatgacccgcacgttccgatcatttttctgacttcctcaccggaatttgcgctggaatcttatgaagtccgcactttctggtatctgttgaaacctcttgacgaagtgcgtttccatgcggttcttgacagctggtacgaagtccacaaggcttctatggctcatttcgcggcaagaacagattccggctaccaggcgatttattttcaggatgtcgaatatctggaagcgcagaataagaatgtgttagtcacattgaaagacggctcggtgatctccataaaagaaccctttcaccagtgtgaaacaattttcacagaggaaaaagggttttataaatgccaccgcagctatattgcagcgttaagctgcgtggaaaagttcggtaaaacctctctcttcacaaaatccggcgcacagattccgatctcaagagacaattacgctaattttaaggatgtttatttttcctatatgtttccgcaggaatgatccggctattggatcccgaaggacgccagtttcatgtcctcgttgaatgccagtgtgtaatgcacctcgatgttctcatattctgcggtcacgtaaacggctgcgatatgagcacctctctgtatgatctcagcatcctgcattgtttcaatggaaacaaaatctccccagtcttccgagatccgtgccttgccctcgtccatgcgctctttgttcatgatctcctgcatgtccgggacaacaaggctttgcaggctgtcaaaatcctctgcattcaaaagccctatgattttttccgcctgtgctttcacttcctcttcgctgaacacttcactctctgccagcgctttgttctgcggctgcatccagtaagttgcaacggatgctgccacaaggatcactgcgacaatgatgatgttgcggatgcgctttttcttctgctccggtgtcagcactttttttgtttttatcttactcattcttctctctgcactttcctttttttcatattagtccctgatcgcatccaacgcattcgaaatatctgcgatcagatcttccttatcctctaaaccgagacttatccggatcagctctgccggaacacctgcctctttcagctgttcatcggtcatctgtctgtgtgtggatgttgccggattcagacagcaggttcttgcatctgccacatgtgtctcgatcgctccgagctttaagttctgcataaaagcagacgcagcctccctgccgccttttaatccgaatgaaacgacaccgcatccgccgtgtggcaggtattttctggcacgctcatagtatttgctggaaggcagacccggatagttcacataggctacctttggatgtttttccagaaattctgcaactgcctgtccattttccacatgcttaggcatacgcacgtgcagcgactccagtccaaggtttaacaggaatgcgttctgtggcgactggatgcatccgagatcacgcatgagctgtgttgtacattttgtgatgaatgcgccctcattgccaaatttttctgcataggtcacgccatggtagctctcatccggtgtacagagtcccggatatttgtctgcgtgcgccatccagtcgaattttccgctgtcaacgatcgcaccgcctactgctgcaccatgtccatccatgtatttggtggtggagtgtgtcacaatatccgcaccccactcaaatggcctgcagttgaccggagttggaaatgtgttgtctatgataagaggtacgccgtgcgcatgtgctgtttttgcaaagagctcaatatctaatactgtcaatgccggattggcgatcgtctcgccaaacatcagctttgtgttcggacggaatgcagcgtttaactcctcctccgatgcgtcaggagacacgaaggttgccgtgatccccattttggcaagcgtaactgcaatgaggttgaaggttccgccgtagatcgaggatgatgccacgatatggtctccactctcacatatgttgaacatggcaaaaaagttcgctgcctgtccgcttgaagtcagcattgcggctgtgccgccttccattgctgcgatcttggctgcgacatgatcattcgtcggattctgcagccgtgtatagaaatatccggatgcctcaagatcaaatagttttcccatgtcctcactggtgctgtatttgaaagtggtagactggatgatcggaatctgccgcggctgtccattctccggggtatatcctgcctgtacacattttgtgcctattttataatcgttcatttcattttccatgcctttccgcaatctgcccttcgtatccggcagtcacattattgtcaaactgatctgcgccatgatctctgctgcagatcatcagtattattactgtagcattataagcgccgtttttcaagaattgtttttcctgtctgcccggaagtaaaacacttgcagaagtatgttattttcgatagtatataagtatcagatgtacggatacaggttgagtcagaacaggtagttgtctgatcgatcctgaagataaaaggaggcatcctcatgaccgaacaggagatcaaggatattttacaacaacagaaccactttttttccactggcaaaacgattccggcggaattccgactgaaacagttagaaagtttaaaggaggctatgatccgccatgaagccgacctcgctgcggcattaaaggaggatcttggaaagagccgtatggagagctatatgtgtgagattgggctgacgctgtccgagcttacctggatgcagaagcatctccgcagccttatgcgcagcaaacgtgtttccaccccggtcgcccagtttgcagcaaagagcttccgctccccttccccttacggaaccgtgctgatcatgagtccatggaattacccggtgttactgacactcgatccgctgatcgatgccatagcagccgggaatactgcggtcgtaaaaccaagcgcctacgccccttgcacgtttgatgtcatgaaaaccatgattgaagaatgttttccggcacattatgttgcagtggtcgatggcggccgcgcagaaaatcaggcactgttacagcagcgttttgacatgatctttttcaccggcggaaagactgtcggacgggaggtactccgccatgcggctgaatatttaacccctgtcacattagagcttggcggaaagagcccatgtatcgttgactccaccgctaagatccggcttgccgcaaagcgtattgtcttcggcaagtatttaaactgtgggcagacctgtgttgcgccggattatattctctgtgacaaacgcatccgtgatgagcttatcactgcaatcttagctgagattgaaaagcagtttgggaaagaacctctgaaaaatccgaattacggaaagatcatcaacgaaaaacattttgaacgcattctcgggctgatcaattgggaaaagcttgtgtatgggggacagtcagagcctgaatcgctccgcattgcgcctaccgttctcaataatattacgtgggacgaccctgtgatgggcgaagagatcttcggtccactgcttccgatcctcaccttcgacacattagacgaagcgcttgataccgtggaatcccaccctcatccgcttgcgctttattttttcagtgaggacaaggctgcacagaagaagttcttagatacctgtcgttttggcggcggctgtatcaatgacacgatcattcatcttgcaacgagcgatatgccattcggcggtgtcggtgagagcggcatgggcagctaccacggcagggttggttttgaaaccttcagccattaccgcagtattgtcgataagaaaacgtggatggatcttccgatccggtatcagaaatataccagattgaaagaaaagatgctgcggatgtttttgaaataaggggggattatactccccttttatttccctgtc

SEQ ID NO: 14334 - DNA, 4574 bp, Unknown
  gut microbiota DNA sequence
tattctgtttatgccaaaacatttcttaccggcatcctttagagaagctccaatatgatatccttctttaccatctataatcagaaacctatcatgaaaagatgctgttttttttacggtaagtgttggatactgtgcattaaaatttgctatatcctgagccgataactttgtattaggcaacgtgtatgtataaacattcacccctatgttcttcttagccaaaatgttcaacgtaataatatcaatatatccgtcaataagaattatctccttttgggcatgagtaataatatttgtgagtaaactgaaagcatcaaatatctgtccgtcaaaaaaaatcttctgacattcctcttcatgattggatatatattcaaatatttttgtaaaattttcctccgcatctttttgtaattccagttgtttcagttcaacagcattaatcctttcaaacaaaagagcattgcttgaaataaaatgccgcatctcgcgaaatgcacgcattataaaaatactttgtttttctgcaatttcaccacttaacactgtcgccaacatataaattccctgttcggtaaaaacatggggtaaatatctgcttttgggatttatatttgcggtcggaaatttcgaccgcaaatcgtttacttcctccctcgtcatttgaaacataaaatcttccggaaatctatttttattattctttacttgttcatttagtcttttcactgtataaccatacagtatagccagatcacaatctaacattatctgttttccgcgaatcgtatatattaattttgatagttcaatatcctgcttcagtaatgttggtttctcaactatattggtaatttcgttcatcaaatttcctctctggttattttgaagttccaaaacaaaacctcaaatccgaatcacaatatacaaatttattttatatttcttcaagactttgtatcttctttaaagcctccatataagccatcagacgcttctgctgttcttccttaagtccatggtaatcttgaaccaattgaatatcataaggcgtaaaacaactctcacgacttgtaacagtaatgttttcttcatcctcgataccttttccagtaagaagttgttctggtgttatctgtaatacatgacaaatatccatgatcttatccgcagtaggatttgtctttctttttttccattcgctgatggtactggtcgcaatcccaacctgttttgcaaattcagcctgtgtcatatttctgtctttcaatacttttaatattctctcgctgatcgtcattttattttcctctcgtttttctattcatatatataaatttcacatctatggatatatcttatcacattatattcatgtactcaatacgaaaacaattttatattttctcttttagatagaaaaaagaaccgatttctcgattcttcttttccaaactctatattcccattatacactccaatttttatacataaaactgtaatgcaagttcattataatgcagtatgtcttccacttctgcaagccgtgtcctgattttttctgactccggctgttttttgagattatccctgatgtctgtgtaaatcagtttttctttttcaaggaaagttttcaacacaggatggcggttttgcaggagtaatccaccatagagatctgaaagtttcaactcttccgaagctttctgtgccttttcaccctgatactgcactttcatcatcggatagaattttccgtcctctaacaccatgtcctctgcgagaatggtatatccttcttctcttaaaaactcacggacgtgctctatctcggactgtggctgcaggatgagttcttttgcagtccggcagacctgttccccatcctgtaagatatgcatgacaagtccgcctcccataccggcgatgaggacagcttccacctcgccaggttttaaagctgccacaccgtctgagagacgtgtctgtatgtatgcctgcaatccatataaagcaatatgttcttttgcccgctctaacggtccttcgttgatatccatggcgatcgcagatggaattttctcctgctgcaacagatagattggaatgtatccgtggtcagttccaacatctgccagtgtatatccctgtgtgacaagagctgcggctgtcgttaaacgatttgaaatctttaccattttactctaagtaatcctttaatttgcggcttctgcttggatggcggagtttacggagcgcttttgcttcgatctgacggatacgctcacgggttacattgaactcttttccaacttcttccagtgttctggcacgaccgtcctccaaaccaaaacgaagtgtcagcactttctgctctctctcggtcagtgttccaagtacttcctctaactgctcttttaacaatgtgaatgctgctgcatctgctggtacaggcacattatcatcctgaatgaagtctcctaaatggctgtcttcctcctcaccgattggtgtctccagagaaacaggctcctgcgaaatctttaagatctcacgtacacgctctaccggcatattcatctctgctgcaatttcttccggactaggttcacgtcctaactcctgaagtaactgtctggatacacggatcagcttattgattgtctcaaccatatgaaccggaatacggattgttctcgcctgatcggcgattgctcttgtgatcgcctgacgtatccaccatgttgcataggtagaaaatttatatcccttgcggtagtcaaatttttccacagctttgatcagaccaaggttaccttcctgaatcagatcaaggaaaagcattccacgtcccacatatctttttgcaatggaaacaaccagacgtaagtttgcttctgcaagacgtttctttgcctcatcccctgcatcaagatctttctgcaaattcttgacctcttctttgatctctgcaagttcttcttccgttgcattctcttctctgctctttaagattgcgatcttttccttcgccacagcaccggcttccatattttttgccagctcgatctcttcctctgcacttaaaagaggtactttaccgatctccttcaaatacatacggaccggatcttcaatggacacgccatccggcacggaaaggtcgattttttccacttcgatctcgtcttcatcatctacatcgagtaaaatttcatcatcagaatcatcatctgtgatccgaagtacatcgatattgtttgcttccagaaaatcaagaattttatcaaactgctctgcctctaactgcatgtccgcaaagaagtcgctgatctcctggtattccaacatgttctttttctttttggccaaggctaacagatcttttaacttctgctgaaacttttcttttgcagcttcatccatcactgctgcttcttttttggtttcctttacctcgttttctgtcttttttgccattttgtttcatcctctcaagttttctactattttgtccctaatcaatggaaatatgcaatttctccaattcttccaggtcacgtttatctgttactagctgcatcagaccagccatatctgtcggtgccaaatgcccggaccgatacttgatactgttttgtttgatgcggataatggtctctttcaatgccttctcccggtcttcttttgactcgacctcatggattcttgcattgaaaagcgccgcaatctctttctgtgcctcctcatctggaaacatgctgacgatcttcgccgggtttgcttctccgctctcctcaaactgctggaataatacttcagctaccttatgatatatctcctccgtaaaatccttcggtgcgatatatttttttatcttatgatataatccggtattctctatgagccatgtcaaaagaagtttctgggattgcttcatcccatcttcttttttgattcctctggcggaggcgtttttctcattgataccggtttttaactgggttggttgttttcggatgccttccatctgcattccgtatttaccgacaagccgctgtaaatcctgcgttggcagcatatatttttccgcgactgcctgaacgtaaatatcacgctcgattttttccgtgaaggagcagagtttctttgccacttcatgataaaaggctgacttgctctccggatctttcatgtcatactgctgttctaaaatgcgtatctcaaacataaagctgttctccgcatgatcgatacgatcctgatacgcctctgcgcccagagccttgataaattcatcgggatccttgtgcgggcgcatgttgatcacttttgtcgtaatccctacttcctttaagatcggaattgcccggagcgctgctttcacccctgcgccgtcactgtcataggttaagtacacttccttggtgtaccttttcagcaggttcgcatgccctgccgtcagcgcagttccaagcgatgccaccgcattgtcaaatcctgcctgatgcagtgcgatcacatccatatatccctcacacagtaaaaactgtggtttctttgttgtcctt

SEQ ID NO: 14335 - DNA, 1650 bp, Unknown
  gut microbiota DNA sequence
ctggcaacatactgtgcatattcgtttaatgtattgcaatgctgcattaactctgcattgtgtccctcattgacatttaaaaccgtgacaattaattcaagctttggttcacctgacaaatgttcaaatgccgaggagagccgaagttctgtgcagtcgggagctgccgtcgatccattgtaaaactcaataaaatttggtgcaggaattttttgcagagtcgaagaataaagagatttcttatccacgagtttctgatattcactgcaaatataaaacagatcacgaagaggcatatttggattgtaggttgactgatgctcatacagatacaaattagtatccataataaatgccagatcatttttcatccccatataaatagcattctctaatgtgacgatttccagatcatctggattattataatcgctctggtttactgcattatagagggacagcagattcttccggtcagaaaacaacatccgaaaaacggtgtctttataattctggtttgccgtcggtgttttgactgtaaaatttctttttgtcttgttacggtttcttttgcattttgccataaatcgtttcctcctgaaattgtaggacagcttatttataaaactgttcgtgattgcaggagaaagtgatcatatattttactaagttccttcgtctcctgcttttcaattgttaaatgggtaacaaaaagcatagatacgaatgaagcatacagattatttggggctgatctgtcgccgttagaatatagatgacaaaaatgtcatgaaatttgtaaaatatgctttagattattgtaacacaagggtaggaaatgaagcaagaaattttatagcaaaatccgttccacgtcatatccattatccgtcaattctaaaattgcaatgccttttccatcgccgcggtcagccccggcgctgcccggattgataaaaacttttccgtagcggtcgtagtgcgtgaatacatgggtatgtccgaaaattataaaatccgcatccgtgagatcaaaaggcaggtcagctttgttatggacaagataaaataattttccattaatcggcacggagacaaactcatgcaggtaggacgcccactctccgtggtcacagttcccacggactgcatacatcggaatgccgcagtttaagaatctgttataggtacgttcattgtcaaaatctccggtgtgaatgagataatcacaatttttgatatggtcaaataattctttacggcatacaccgtgtgtatcggaaactaatgcaattttcatgaatcagacctcgcttcgtttgcttgtaattttttcacttcgtcaaagggcagacctgtgatcgcagcaattttttcgagtgagaactcctgtaattgaagcatgcgcctggcagtttcgatagaatttagttctataccatgcttttcgccctcagagaaaccagcctcatgtccatacttttcaccctcagagaaaccagcttcatattctgcctttctcaattttttctcttccaattctttatcatactcaaagatactcatactgatgacctcatttcggttgcgggtaagaaattcggctaaaatcccttccctgacacactcgtctacggcacgttccacggc

SEQ ID NO: 14336 - DNA, 6536 bp, Unknown
  gut microbiota DNA sequence
aagcatcttgcagatgacagtcgttctgtccttgcaatttttgcagatgtatctgatacaacagattccggcaaatttatatgggatacggtaaaagatgcaaacccgaatcacgtatgcccggtcattgcaatctgtagggagggctctttagaccagatacagacagcagtttcctcggaaatcattgacgatcttcttttttcaccgttggaggtctctgttttaaaacgccggatcaaggcaaatattcatcctgataaaaataatgaagccgatgcgtaagcatcggctgtttttatatactatgtattttcagtatgcctgcaatccgggtaccctgtgcagccccagaattccccgaaacgtccatttctttttttcatcggaagcccacattccgggcagattttttctttcgactgcttttttgctgccggcattttctccaattcttttgccagatactcaaatacctgctgattcatcttgcagtctgtcagcgccctgtgtgcacctcttgttgaaattccataatactctgcaagatcgctgagtctcctgtgccgccactccgggaaacagagctttgcaacccgcagcgtatcaacataatcattcgttaatttctgctggaaaagccgctcacaatcccgatataaaaatttcatatcaaatgtctggatattatgacctaccagaatatcatctccggcaaatgttaaaaactcaggcagcacctgcccaaaatccggctcatttgccaccatctcatccgaaatatgattaaccatactcgcggcatacggaatcggtcttttcggattcacaagctggctaaactcctccacaacttttccactccgtacttttaccgctgatatttcaatgacttcatcataaatacaagatgtcccggtcgtctccaaatcaaagagtacataatccggtacatatccgcatatcatctttccttttttatttcctaacatatcttctgctttctaattatttgaactgccaaatatttttctgtgtttaattattattcacttaatcttgtaccgcatttcgggcaatattcaaaatcttccgttgtggaaaatccacaatttctgcagcgtttcatgctatatccgtacccttgctgattcatccttcttaaatgctgtggcagaatttccacatcttcgcctgctgcaattctttttcctacttccgcatccaattcgtataccgtattacagcaactcgtctgcacataataatgcttattccatttaaaacatgggataaaaaataacgacagcaccgtataggtcataaacacctgaaaccttccgtattttccacagatatcacagattatctgctgatgaaagtcaaagtcttttctcccatctgtaattcccatcataaaaaacatattgtcacctgctaaacttcttactctctcatcttcattttcttaagataaccatttttcagctcattttcttcccgcagcttttcgttttcgtccttgagatactgcatatattcccgcgcaagcttcacaccacagcgcactgcaacatcatcatgcttttccatctcatccagccattgaagaaatgatttttcccgaatatcgttatactcactcttttttgcaaaatacatgattcattcctcttcttctgatttaacataaaatgttatcgttactgcacacttgtacctcatttgaacatcatattattttccgtacacacagcgttctctgcccggcatatcttcccctttgacgtaacgcgcattaaattccatattgatttcacgcagttctcttttcccgtcaatatagtcctgatacatttctgccagtccggacatacagccatcacagcttgcttcaatatttccaagagattccttgacaatcgcctctctctcttcttttgttgtttctgaaattaaatacatttttctacctctctataccatctgtacgagccatacattgcttcgtaccataaaataaccaattgctacttttataagttctgtcgcctgcacgaagaaataaacgctcacaattccaagtcctgtgtaatgtgcaagcacaaatgctgccggaactacaaccacccaggtaaaaaccgaatcaaataaaaaagtgaccagcgtttttcctccggagcgcaatgtgaaataagaagcatgactaaaagagcaaaatggcataataattgccgaaactgcaataaaactggttgcaagctctttgatctgttcagaagtattataaatctgtgggaaaaatccaccgatcacaagcatcacgcccgccacaagtgcacagcagaatacactgaaaacaatcattttattatctgcgtctttcgcttttttcagttcaccagccccaagatactggccaaccacaatgctgatacatgctccaagctggatatagataatgttaaacagattcgtgatcgttgttgcaatattaagacctgccacaacttccaatccacgaatggaataacactgtgtaacggttgtcatgcctgctgcccataaaacctcattgatcataagtgggaagcctttgataataattgccttcaattcctcttttggcattccaattccggtgtacgcaccttccagatatctatttttctccttatgggaatgtgcccagacaataatgataaatgcttctatgtagcgtgcgatcacagttgccagtgctgcaccaataactcctaattttggaaatggtccgattccgaaaataaacagatagtccaaaaccgcattgcttccaaccgctacaaaacttgcgatcatcggcaccaacgtctgcccggtttctttaatattagtagcataggactggtttaccgcaaatggaaccagaccaaccatcataatgcccaggtattccagaccatactgcagtgcaacctcggtcgctccacttcctgccgtatcggtgagatacagagaaatcagatctgcaccttttgtcgcaaataataatatcgttaatcccgttacaagcaatgttgcatacaatttaaaacggaaagaatacatatgtcccttatgatttccttttccataatactgtgccccaaaaatgctggctgcagacgccgcaccaaatattgccagattgtatacaaaaatcaactgattgacgattgcaacaccggacatttgctcggttcccaactgccctaccataatgttatccagaaaactgacgagatttgttatggcattttgcaaaatcattggcagcgcaagatagagataccttttgtaaaatgcggcatcgccaatatatttttctttgaatcgtattaacatatatttttcctttattacatataaaatctattttttctacatcttccgctaattataatttgtcctcacatatatatcaatccctcttgtattcttttacagaacttatgcagttttatatgcaggattacagccttagcctttcgcctgtctcaagttatacacagtcgccgagccaatgacaagcaccgctccaaaaatggacaacgcacctattgtctctccgcagaaaattgctacaagaataggatttaaaatcggttcgatcgtagaagtcagcgatgctgtcactggtgaaacacgatctaatcctctggataaaaatacatatgacaacccgaactgtacaattcctaataccagaacatatccccagacggttggcgtgaacactgtctctcgcattaaaaatggaattcccaccacaatactgatcagatgagagaccataagcgacgattcaaaatctccgcccgggaattttttgatcaaaaacacgcctgcgtaagtcactcccgacacaattgcaaggatatttcccgccattccacctgtgctgagcgattcaaaaaagaagcagaaaattccacataacacaagaatgcaggttaaaactgcgtccttttttggtttttgcctgtatacgatccacacgatcaaaatcaaaaagaccggttctgtaaactgcagtacaattgcatttgctgcggttgtcatctttgtcgccatcacgaatgtcaatgccatgacaaaatttaaaaccgctccaagcagcaccattttattaaaaacaaactttctcccctgtgttctctgataagcaaatatcagaataaatgataaaacgcttcgcaccatgttgatcgacaacgagttccacggaatcgatttgatcagcactccgcccagactgaaacagattgctgacaataatacatacacggtaccctgtaaactatttttattgtatttcttttcactcataacgtatcttattattcaaaatttaagaaataatattctccttctctgcttatcttacatccatctgatcaatccataaacggccagcagaactgccagatatcccacattggcaatcgtaaaccacctgaaatattttcctttctgttcgttatagtgatgtgcataaattttatatgagatcagacttgccattgatgcaatcaaggtaccaagtcctccaatatttacacccactaataattttgcatagtcctttgtaaatccagaaagtaataaggctgctggaacgttactgatcacctggcttgcagcgataccgactccaacttcccggccactcacaaactcctgtaacacattcctgattgtctcaatttctcctatattcccagtaaaaatgaaaaaagcgataaatgtgagaattaaactgtaatctaccattttcaacacttgtctgtccatgataaagaccgtcacaaacacaacaatgaaagccacatagtacggcaatactctcacaacgacaagcagactcatcagaaataaaatcagataaattgcatttttttgatgtgtttttcttcgaagatgtaacctttctttttcaatttcatggtcgctgttattttcttcgagtgtaaattcaatcttctctttttttctgcatacaacagcaacggataacagcagcaatataccggatgttaacgtatatggacctataattcctataaatgttgacattttcatctctgcaagattgtaaagatataaattttgcggatttccaataggtgtcagcatacttccaagattggctgcgagtgtctgaactatgattaccggtattaataatttttcctgattacatttccgcaaagtcagcattgcaaaaggaacaaatgtaatcaatgacacatcattcgtaataaacatgctaaagaaaaaacataaaaaaaccaacacaagcgataactgcattgtattttttgttcttattaaaaggctgcttccaatcatatcaaacaagccatttctctgaagtcctgccataaccgtcatcaggcttaataaaatgcccaagacgcggaaatcaatatagtttacataattcaatgttggttttacaaaaaaagcggataccatcgcaagtgtcgttgctacgcataatactgtatctttttttataaagcctattactttttctttcattattaaattctccaacgctgttttttgatctgttcttcttttctcaaataagcagcctcatccataaaagatattagttcaggagtccaagcctgtctaatgcatggtaaagcccttcttcatcaatatgtgatgtcaccatgtccgccctctttttcacttcctctttcgcattccccatcgcaatgccgattccggcataatccatcatctgcaggtcgtttggaccgtctccgattgcgatactgtcctctctgggaatccccacatattccagataacgcttcatcccggttgctttatggataccgttgattccaacttcgccacagtaatcatccgctccgctcaggcttaatgccacaacatcaaaataaggttccagatctgcatgcaccctcgccacaccaaacggcgcatcataatagatcaacttttcttccttctcattattccagacatcttcctgaataaaaaactctcccacaagctgacgcaaatgttcctccgtgattcccatgtcactcatgatatttaaaatctgctgttcactccgcttattcatgacaacgcctgaatctgtctgaaaacagtagacaaaattatttatttccatataatctacaatgaattttctgtgttcttcatcaatgacagcatgataaatttcttttccgtccgcaatcacctgtgctcctgccgccgttaccattccgctgaatccaagatccaataacatctgcggcaattgaaaaagacttcgtccgctgcacacgaccagtttgtgaccgttctctaccgcctttctgatcgcagttttggtcgattccgggataattcctttatcatttacaattgttccgtctacatctaaaaatacaactttctgattcatagtttttcctgttctctatattttcggctttgaaattgctcatcacaatgtaaagaatacttcttttccagttttg

SEQ ID NO: 14337 - DNA, 2342 bp, Unknown
  gut microbiota DNA sequence
tttttttaattttttttgcataatccgctctcacattaatatttcccctatccgatacagatactgtgtgctataatcagctatgaactatttagaaatgaaaggtatcttattatcatgaatattataattgttggctgcggtaaagtaggatgcacgcttgtagaagccttaagtatcgaaaatcacaatatcgtagtgatcgactcccgtcccgaaaaagtaagtgcccttacggatacagtggatgttatggggattgttggaaatggtgtaagccacacaacattaaagcaggccggtatcgaaaccgcagacctgctgatcgctgtcacaggatctgatgaggaaaatctcctctgctgcgtcattgccaagaagagtggccactgtcagaccatcgcccgcatccgcaaccctatatataatgaagaaaaagattttctccagaaggaattcggactgagcatgatcattaatccggaacttacggctgcaaatgagatttcaaaggttttccagtttccttctgctatccgcgtggatacctttgcaaagggacgtgtggaattacttcactttaaaataggaaataactcccctttatgcggcctgaaactttccaaattccacgcaaccctgcactgcaatgatattctggtctgcacaatcgcaaggaacagcgaggaagtcattattccaaacggtgattttgaatttgcggcaaatgacatcgtctccatcgttgcaaaacgcagggatgccatcgactttttccgcaagatcggcttagagaaaaaccgtgtatccaacacgatcatcgcagggggaggtaagatatcctattaccttgccaagagtcttctgatgtccggaatcaagacgaccattatcgaaatcaaccagcagcgctgtgagtttttaagcgagcagcttccgaaagctacaattctctgcggcgatgccactgacaaggagcttttatctgaagaatgcattgaaaaggcagccggttttgcggcgctgaccgatctggatgaagaaaatattcttttatccctgtatgcgaatggaatctcttccgcaaagacagtgacaaaggtaaaccgcattaactttacctccgtcatcaataagctggatctcggaagcattatttacccgagagtgatcactgcagagtacattatcaaatatgtgcgttccatgaataattctttaaacagcaatgtggaggcgctatacaaattggaagatggaaaagcagaagttctggaattcctgctcaaagagaattctgccgtctgcaatattcctcttcagaatttaaagatccgcaaaaatactttgatctgctgtatttaccgtaatcatcaggtcatcgtgccaagtggacaggattgcatgatgcccggcgactctgttatgatcgccacctccggttacaatatatccgatatcaaagagattctggaggattaagctgctatgaagtattcaacaataggctatattcttggacaggttttgaaattcgaaggtatttttatgctgcttccgtttctgaccggaatgatctatcacgaaaacgaagcgtattcttaccttattatagggatcatctgttttgtcctcggatgcctgatcacgttaaaaaaagtaaagcatccgcagatatttaaccgcgaggggtttgttgccgttgcattaagctggatcgttttaagtattttcggtgccattccgtttgtgatcactggtgagatcccatcttatgtggacgccctgtttgagacgatctccggttttaccacgaccggcgcaagtattctctcgaacgtggaggcactcacacacacaagtctgatgtggcgaagctttacccactgggttggcggcatgggggttttagtattcatcatgtcctttctccctctgatgggcggttcgacgatcaacctgatgaaagctgaaagcccggggccttccgtcagcagattagtaccacatgtgaaggacactgcaaaaattctgtatcgtatttatttggtcattacgatcattgaaattgttttattatgtattttcggtatgccgatgttcgactccctgacgctgacatttggtacggttggaaccggtggatttggtatccacaatgacagcattgcaggatatagccctgtgttgcaaaatattatcaccgtctttatgattttaagcggtgtcaattatgtcgcttatttttacattatgacaaagcagttgaaagaaatttttaaagtggaagaaatccgggtatattttggcaccattctgggtgctggtacttttatcgcact

SEQ ID NO: 14338 - DNA, 575 bp, Unknown
  gut microbiota DNA sequence
agatttaaccttcgaggatttatcacattatgcgtttcaattctgcagtggagccggtggctggtctaccgattttgaaattgaaaaagatggctctttcaagggaaactaccatgattctgacatgggagacaccggggaaaactatgagaatggaacgaggtacatttgcggcttttcaggaaattttaccggattgaccaaaatcaatgattacacttatgagatgaaaatggacaatcttacctatgaggagactccgggaaaagaagaaatcgcagatggtgtgaagtatatttatacagatgtttatggtctggaaggaacggatacgtttaaagtgtaccttccgggtgcaccggtgagtgatctgtcagaggaagagtatttctgggtgcgtacagcaaatgaaaatggtgcagaagaatcgcaggatacactgacgattcctgtcattgtgaatgagaaaatggaatatggaatttattcttacaagcgaatgacaccatatgaagaagcgaagagcacgctgaccacgtaccaggcatcctatgatgcagcagaagaagaactca

SEQ ID NO: 14339 - DNA, 599 bp, Unknown
  gut microbiota DNA sequence
tgcttgtatcgcaccccaatgggcagccgtgtttgaaacccagttgccttttatataccacacaacctgaaaattatcaagtatgcgcagcgttcacttctcccatcaccgggagcaaatgaacgctgcattttttgtttgcaacgaaaggaggcatccgtgaaatggcagtttttcgtgtagaaaagaacagcggctacacggttatgtcgaatcaccacctgcggaaccgggccttgtccctgaaagctaagggcttactctcccaaatgctctccctgccggaagattgggactacaccctgcaagggctggcccgtatcaaccgggaaagcattgacgcgatacggcaggccatccgggaactggaacaggcaggctacatccagcgttccagagaacgggacgagaaagggcggctgcgcggttcagactatgtaatcttcgagctgccgcagcctgttcctgcatcggtttcacctacattggaaaatccaacgttggagaatcccacgcaggaaaaccctacgttggaaaatccaatgcaattaaataaagataaactaattacagaaaaacaaaagaaagagggattaaat

SEQ ID NO: 14340 - DNA, 1168 bp, Unknown
  gut microbiota DNA sequence
tgtgtgtccagcgaagctggaccacactagccggtgtaagtccggtcacggtaatcgccagtgagccgtgtagctaaactcggtgcgttgcagtaatgcagggtactaagcgagtggataaagtaacctcggtaagaggggcgagcaattatgcagaccgtaacataaagtgaattctgccgtatcgttagaaaggtctctgaaaagagagcaaagggaagctgaaccctgggcgtatgggtgaaagccatggaacgtgtgaagaaactggaaagcagcacggaggaatccctcggtatataggaaacggtatgtatgaaaagtgtggttcggaactggagagaccctacccatcaccgaaaggtaaaaagaaagcgtataagcttggcgaaatcgtatttctgatgggagggagtcggagaggaacatagtaccaataatgactgtgcaagaaaacgcagtctatgggaaggttccttgcttcattcatgtttgtagagagggtaagagtgagagaatgtcatgcagactaacaactccaaagaaaaagttcgacaacttcaaaacaaactatatctgacagccaagaaatgtgatagccgaagatttcatgcactttacgataaggtatatcgtgatgatgtactttttgaagcatggaaacgggtaaaagctaacaaaggttccagtggtgtagatggtatcggaatcgaagatattgaagagatgggaattgaaaaatacctgtcagaaatcaaatcggaactgatggatggaaagtataaaccatccccagtaaagcgagttatgataccaaaaccagacggaagtgaaagacctcttggaataccaacagtcaaggacagaattgtgcagatggctaccaagatagcaatagagccagtattcgaagctgactttagagattgttcctatggattccgaccgaaaagaagtgccaggcaagcactggaagtggtaaggaaagcgtgtaacaacaagggctattatgtagtagacgcagatattgagaagttctttgataacgtaaaccaagataaactgatgaaactggtagagcagagaatatcagaccgtaggatattgaagctgataagacaatggttagtatcaggagtattatacggaaatgtactgacaatttccg

SEQ ID NO: 14341 - DNA, 1079 bp, Unknown
  gut microbiota DNA sequence
acaatgattctgatgaaatgccgacaaccggagcaagcaacggaattaaattagcagatcttcgtggtgtagattatgacgatacacagtgggacagcttattagacgagttaacaatctctgatatggatactatgatcgccattggtggttatcagacatccgcagcgtccagtgttggaaaaattatgacaatcgactgtgacggaccagcttccatcaacaataactttacaggtgtaggatctgttggattcccatccgcagttatgatcgcaagtacatggaataaaaatcttgcattaaaattcggtgagagcattggtaaaatggcagatgaaatggaagtttccggctggtatgcaccagctatgaacacacatcgttccgcatttgcaggacgtaacttcgagtactactctgaagacggtgttctttccggttatatggcatccaatgcgattattggtgcagaagaatatggcgtttacgcatacatgaaacactttgcattgaacgatcaggaaacaaaccgtacagaaatgctttgtacatgggcaaatgaacagtctatccgtgagatttacttaaaacctttcgagatgtctgtaaaagagggtggagcaaaagcagtcatgtcatccttcaactacatcggaactcagtgggcaggaggcacaagcgcactctgcaataccgtattacgtgacgagtggggattccgtggattcgtattaacagactactttggtgtttacggttatatggattctgatatgggtatccgtggcggtacagactgtatgttagtagcatacgataccgagacaaaccatgtaacagatacaacaagtgcaacaggtgtactcgcaatgcgtcaggcttgcaagaacattatgtacacagttgtaaacagccgtgcatatgatcctgaaaaccttacagaaggattaatgaactggcagatcattgcaatcgtaattgatgtgatctttgcagcacttatcatcttcttagaagtgcttgcaattaaaggattcaaaaaagatcaggtagcagaaccagttgcagcagtagaa

SEQ ID NO: 14342 - DNA, 2978 bp, Unknown
  gut microbiota DNA sequence
gaagataaagtagtttacataatgcatttaccagtttgtttctccacttatcctgcgccagtaatgcgccttctacgcctgtgcatgcaatcatgaacagacatatctgtgactcaaaaccatgaagcactccgcagattccaatcataacaacagacagcagaaacagggaaaatgcacatccctgatagtatgcgtttttgtattcgcgcatacctttcaatttatcctctgtaatgccgttcatctcgtaaatctgagtattgatcttctcctgaaactcctgattggacttccggctctctctcgtccggttcagattctcattgatgtcgctgtttaaaccatcgatgactctctgttcttcgatcatctgctctaaaacagcatcttccgcttcccgctgccttttgatctgttccttgatccactgggatttctgaatgcgcagactctctttgagattcgctttttcttccgttgccggtaactgtgtatttgaaacttccgtgttgatatctttttccatattgatccctgcttcttttgtatcttactgttgatttttacggtctgcacaatgtgtgtgagccttctctgaataattacattttacccacatgcaggctaatccgcaagtggattttcgacagatccggatgcaaggctctgattgttttttatcaaaaaaacaagtccatgatcacctcatgacggaacacctctgcttcattgctcccgtcatacttttcatggtataaattattgttcattctcgtccttcgccatttttgccatggtactggtagctataccagcctgctcgcaaatgtcttttttcttcattttacggtcaatcagcatcttgaaaaatttgttatatgatacgtccatacgtttctcctttgcgaatcagattataaattcacataacagaagtattataacatagacgcagaaaccatatacaaacagctctgtgaaaaagaaaagtactgctttattcgtgaatttccaatggtagattgtcagggtcataaaagaatgtcatttttttgcctgtgtaaatatcgaatctgatcggctcagttataatgccccttttattcaattctcttacggtattctcgaccgagtctacagcaaaggcaagatgccggagaccgtaagcctctggataactggggcgctttggacaatttttaatgataaaaagttctaattctatcccatcgagttgaagatcaattttgtaatcatcacgttctggtctgtaattttcccgaataatagaaaatcctaacagatccacataaaagtgctttgattgctcatagttgctcccaataatggcaatgtgatgaacttttttcaaattcatggtgtatttacctctctcctactttgtttgaatacatgaacattatatcatgaagcttagtccgcagtgcatgccagaaaaatcaaagatttttctggctgacgggcattcgccctatcactctcgatatatacagacctcaccatgcaagcatgtccggtctgtatattctcgattggcactgctcattgcttacgcacattatatcatattgctaaattcattaacactaagattctaacataatcgcatctgcaattccacttcattctaattagaatacagaatgtccgcattgtggtgcacataaatattgtaagaaggttcttacaaaacaaaacttctttcaatgtattttaatagaataaaaagtatgactatgatagaattacaatatcaatgaattttgcgaatcagaattgtaaaggagtgaagttgtaatgaaaatccgtaaggcagaggaaaaagatattcccagacttcttgcactgttggagcaggtattgcagatccacgctaagatccgtccggatatttttattcccggcaccaccaaatacactgtctgcgaacttgcagagcttttgaagcaggaggataaacctatctacgttgctgtgaacgaggatgatgtgtgtatgggctacgccttctgtcagatgaaggagcagccattttccacgaacatgattccctttaagtcgctattcatcgacgatttgtgcgttgatcagcaggcacgggggcagcacatcggcgaaagcctgtttgaatatgtgaagcagcaggcaaaagagcaaggctgctatgaggtaacactgaacgtctgggcaggaaacacttcggcagaacacttctacgaaaaaatgggtatgaagacaaaggaacggcagatggaatatatcctgtgaccgccaagtcatcgtgaacgactgcattttgccgttatctcataggcactcctccagagtttaacggacgtagtgtcgcagattctgcagtgcttttataggttgtgaaagggcagatataagcgtcctctcacaagtcgtgattttatgggtttatgaaaagaaaaacggtataaacgaaatattatgtttctgttcgctgaacattccgataagcctctaaagagtcttatctccatagctcacgaaggaaatcatatttgtctgcaccgtttttctttcatttacgctgtgaatgccttgtgagaggacgcttatacatgcccaatttacgctatgaaccgcaccacagaatctgccaatttacgttatggaactcttggttataagatggacgcctatgagggaatggcaaaaatcgatctacattctcaaagtaaattaattataacttctgtaaatcgattttaatagaattgtaagtgtaattatggtaaaatgatgatattaatgaagttgatatatcggaatttataggaggaaattagacacatggctgtcagattcaaagttgcgttcttttactatcaaatagggcatggagattttctacactcctttttctcaacagtttcttataatttagaaaacaggaaatggggtagcagattcccaacgattatgaa

SEQ ID NO: 14343 - DNA, 2469 bp, Unknown
  gut microbiota DNA sequence
ctgcttgaaaataaaaacataagaggaatcgtcatccagataatctggcagtttatgacggcaggaacccaaatacattgccggagttgtctccaggcgatccagatatgccggattttcattcataatttctgtcagatttaataaattattgtttaagatgccaagaattccatttacagacccatagacagtctcatactgatcagatgccattacgccacggatcacacctgctaagcttgcgttaattgcgactgtcgggccaccggactgtgcgaccattacattttttaaactcatagattactccttaatatttgattaacttttgttaaaaacagtatccattttttccgtttttgttataatggaaaatattgaaattatttaaaaaatcattttgactgctatataatagcggaaaatgttgtatttagcaagaggtagtaagtgtgaaatgtgatttatgcccaagaaaatgcctgacagacagggcaaaaggagaaaagggaatctgtgggcagacagataaattaaaggttgcaagggcggcgctccatttctgggaggaaccctgtatttcaggagaagcgggatcaggagccgtatttttttcgggatgtccgctgcattgtgtgttctgtcagaatgaaaatatcgcaaatggaacagtgggaaaagaaatttctgtggaacggctggcagaaatttttctggaattgcaggaaaaaggtgccaataacattaatctggtcacaccgggacattttgttccacagattacgaaagcactggatcaggcaaagcaggaaggcttaaaacttccaattgtatacaataccagcagttatgagaccgtcgagacaatcaaaaggttagagggttatgtggatatttatctgccggattttaaatatatgagttctgcgctaagcaggaagtattcccacgcaccggattatgcgaaggtcgcaaaggaggcaatcgcagagatggtacggcagacaggaaaggctgtgtttgtaaatggagaggaagataaccttattttaagtggaacgatcgtaagacatctgacactgcccggttgtatggcggattccatgcagattttaaaatatctgcatgatacttacggagatatgatttatatcagtatcatgaaccagttcaccccactttccaatctggaaaagtatccggaattaaatcgcaggattaccgatgaggaatatgagacactggtggattatgcgatcaatatcgggatagaaaatggttttgtccaggagggggacacagcggaagagagttttatcccggcatttgactgtgagggcgtgtaaccttgaaaatgagaaccatattttcttgtggaaaaaatttccaaaaaaataaggaaaattatatttacataatatgggaaaatgctataattagcttcgtatgattacaaagaaggaatagcagcgaaattactgcagacagattctttatcataatagagtgaactacgaaaatttactgaaagtaaaggaaaatgcagacgaggaggagacgagaatgaattttctaaatttagttcagggcgcagccggaaagataaaaggggttgcgactttgcttagcggactgacaaagacacaggcgatcatagcaggtgtagccactgtgacagcagttggcggtgtcggaacaggaggatattttttatatgatcattttcatcagccggaaccgatcgtagctgatgttattataagcacagaggcagaggaaccaacggaggaagtggtagcagttgaagaagttgttacggaagagacagaggctgctgaaccggaaacagttaccttagttggaagttccattgagaaggatttaaagatcaagattcaggatgagtcctcgaagaatgtaaaaggacagccttttgagatcacgatcaaagctgataagaagaaagcaaaagcaactacatattcagatgatgataaagatggtattatttacattaaaagtattgatgccggaaaatatgatgtctctttgaatgagatcgatggatatatttcaaaagagaattcttacaaattaacggttaaggataagattgaatacaccaaggtagatgtcaaagacgagattaaatccgcagcagaagtagcaccggcagaggatgcagaggtagacaatgttgaggtggaggctgttattcaggatacagtggaaacagttgacagcacctgcacgccatccaaagtcggagcaggagatgtggatacttccaatttcccgaaagcttctgttggtggatcaacaaaagtggacattgcacaggcagcagtgacggcttccgcaaaacgtgtgggataccatgctacaggaacagaatcaaatggtgtaacaacaccatcggaaacgacaacaccaaaatcatcagaaacaacaacgccaaaatcatca

SEQ ID NO: 14344 - DNA, 10673 bp, Unknown
  gut microbiota DNA sequence
atctgttcgtttaaagcatctattttctcctggtccatagtgacctgaagatccgtatcaagcactcctgttgccgtcacagatgccacaccctcgatactctcaagcagtggtaataattcattgtccacataatcagatacctctgcctgatccattccatccacatctgcggatgcgatcataaccggcatcatatccggatcgatctgcataatgattggtgtgcccactgaatccggaaattgtcctgtcaactgatccagctgctgctggatctcaatcatggcagaatccatgtttgtgctctgttcatactccaaaacaaccatagaatagttatcataggacatggaacttacattattaatattggaagtcgtcgccattgccgcttcgatcggcgatgtcacatctttttccacttcctccggacttgcccccacatctgtcgtgacaacgatcacatatggcagattcattgccggcagcagatctgttgtcatcctcgtcagcgaaacaactcctaaaacgatcaccagtacaacagccactaacactgtgtacggacgttttacgctatactttgggatcattctctttcctcctgaaaaaatatacattctgttttttgtgcatgcaaaaatcgattgattttatccttagatcattccgcaaaatttcagaaccgaccagtcggtcggtattgattagtctactctttttttcataaaatgcaataaaaacggtgtagaatttagaattattttagaatctgtccatgccttttgaaaaaagaaaaagcaatgaaaactttctcactctgatctgtaagaaatcttcattgcttttctctgaattatatgctctgactgtatttattcttcttcgccatcctcgtcatctacaattgccgctgcagcacctgctacagatgaaacaaccgctatcacgacaacgatcacaaccagcagtaataaaatacccataaaaattaaaaaaccgccttctgtcatgttttcctccgttctgaaaggattgtgcagatccacttctcaaccatttctttttccaaaatctgtgcctattatagcacaattgcggcaggaaaaaaagagcctatgtttgattatttcagacaatttttctgatgttttttaatattgtaatctttttctgctacaccaaaggagaaccgccgtgatatggggaatcacggcggttctcagggaaggttttttcatttgtagctatattctaatttatcctttcacactgccgagggcaacaccctgaacaatgtgtctggataagatcagataaatgatgattaccgggaatatggagaatgcgatcatcacataaacctgacccatatcaaatttcagccagtctgctgcacgaagctgtgcgattaaaattggcagtgtctttttcttgtcattgtgtaagatcaaagccggtacaaaataattattccagctgcttacaaatgtaaagattgcctgtactgcaattgcaggtttcatcaatggaagtacaatctggttaaatgtatggaactcaccggagccgtcaattctggctgcctcgatcagcgataccggcaatgtactttccatatactgcttcatgtaaaagaatgttaccggagcagcgatcgttggcacgatcaatggaatgaatgtgtcttccatttttaatgtaccgactaattttacaaatccaagtgcagttacctgtgtagggatcatcatgactgctaagataaatgcataaatatactttttcagtttaaaatcatatgcatgaatggcgtaagccgtcattgttgaaaaataggtacataacgctgctgacagtactgatacgatcaaactgtttatcataccctgccataccggaagtgttccatgtaacagattcgtccagttttccagcagatgcgtgcttggcagtggtgtaaatccagcctgcagttcaccgttcgatctggtcgcattgatgaacagcacatagaaccagaacaggcaggcaaatgtaacaagaatcaggactacataagcgataaatcttcttgtatggattccaagtccttttttcagatttttattttcgttcataataacacctcacctttctattctgctcatgcttttctcttatcgtttccagttaccttaaagacaataagacttaaaattgcggtgatgatgaacaggattacggatactgcaccagccattccgtagttcttgctgtacagatgtttatttaagaacatgatcaatgtcatggtcgatctcattggatcaccggtaccattggtcaaaatctgtggtacatcaaataactgcaagccaccgatcagtgatgtgatcacaacatatactaaaatcggtcgaagtaatggtaatgtgattttataaaatacctgtgtggaagttgctccatccacctctgctgcttcaaataaggaagtatcaatacccatcatacctgccattaaaagaatggtcgtattaccaaaccacatcaggcagttcataagagcgatcagtcctctcgcacttcctgtgtttgccaggaacttatatggctctgagataattccaatctgcatcagaatcgagttgataggaccaccgtctgaaaacagtgtgaagaacaacatggaaaatgcggatgccatgatcaggtttggcagatagatcacggtcttaaaaaatctgcttccttttaatttcaaacgcacatcagagaaccatgcacctaacagtaatgacaaaataatctgtggcacaaaacacatgatccataaaatcatggtattctttgcgtaaatccagatatcgccctgtgtaaacagcgttttgtagttctccagtcccacaaagtttggtccgatctgtgtcagacccgataaataattttcaaaaaagctgttataaatggtattaaacagtggtataagctggaatacaacatacaccagaataaaaggaatcagaaaaatgtaaccccatttgttatatctgactgctttactgcttttcttcttcataacgcctcttgcccccttctttttatttttcacagagttcacagcatcccttcacggacatctttttgtgcaaatctgctgtcagctctgcgctttacgccgctgactgctttctctccgtccggagatagatataaagatagccgcacccgccggtctggcaggcgcggcttattattttagtatgttaagtccggatatttctcaacaactgctttgtagaataagtcaagtgcatcatcaagtgaagcattgccttcaaagtagttcttcatagcgttctgaaactcttcgttacatccctgatcgtatgcagaaaggttgcttaaatcaagtttttctacacttgcgcagtacatagacaatgggttctgtccgcctaatactttactctggtagcttgtatctgctgccattgcttccatagctggtttattattaacgaaatcatcatcttttactacgatatctttcatgattgtttcgtctgttgtcatctttaagataatgtcttttacaagacttgggttatctgtacctgttgctccacagatccatgtaccgccccaatagaagccctgaggtcctggtgtagcgccccatccaccgttgtaaccaatagatccttcggtatcagctgccatagagaagttcacgaaccaagctggtccaaagtagcagaatacttttccttccggatagaaacctttcttccagtcatcgccccagagttcatatgtctctgtctcgcctgcatcataaagttcttttgaatcagatacccatttcatgatgttatcatcaatgttgattttgccatcttctacccatttagaagtaacgttgttagagtatacacggtaagtatcgttaactgaagatgtcatcttgtatccagcagctttcattgtctctgctgtatcgttgaatgtatcccagtctgaaacatatttctgaacttcgtcaggatcgtctgttccaagaacttcttttgctgcatcacggttatagaataatacgcctgggcagccctgccatgaaacaccttttaatacaccgttagaatcggtaacgatatcttttgtatactgatactggtttgtaaggtctgcatctgtaattccaagatctgcgatcggcattgtataatctgtatcgacatatttcagtgcgtagtcagcttctactaagaataagtcaatcttgtcatcggctgctgctgattcctgttttaataatgttgcatccagattgttctgatatgcgttgtcatcacttggtgtgatgttccattttacggtaacatccccaatcttaccagttgtggcatccacttcctcatatccaggatagtgatctgtcagacggctcttaaactcttcattccagcaataaatgttgaaaacttttccctcatcacctgttgaatctgtctccgctgcatcagatccagattcagttgccggtgctgctgcacctgagttgctgttgtctgtggatgttgtgtctgatgatccaccacatcctgctgccatagttgctaccatggatgcacataataatgtgctaatgattttctttttcatagaaaaccctcctccttaattttttggcttccgccttgtttacattgttatttttgttccggaatctttcctaccgattgtcccggtatgaggattccttctataacgactctctcaatgagagttgtttttggtttttcaatggaaccgatcagccgttttgcagcctctctgccaatctcttctgtgtcctgcttaattgtggtaagcttcgggtgcaaaagctgcgacatcctcgttccgtcgtatcctgctactgaaatgtcttttggtatccgaagtcccatctctataatgacatttcttccaccgatcagtgcggtgtcatcaggataaatgatacaggttggcggattttccagattcagaagttccttcgtctgttttgccgcttcctttgtctccaggtaacctgctgtacggatgtactcatccgggacttccagcttcagttcatccattgtccggtaaaaacttgtcaaccggtctttggtaactgccgaaccattctgctgtccgtggatgtaagcgatcctcctgtgtccctgagaataaatatatctgaccagatcttccatgccctgaatgttgttcgagctgaccgccgtgcagttgtgatgcaggtagtcaatggtgacaaccggtacttcgctattcatcagttccatgacaccagagtcgttaaaatccgcacacacaattgcaactccttcaaaattccggtatttgcaatgttccagataagacatcttccggttttcaaaacaggtattgataaatgtaatgtcataaccctgcttctccgcctgaactttcagaccatttaatactcctgaaaaatattcatgctgtaaacctcttcctgcttcctcttcaaatagaactccgaggttgtatgaatggttggtcttaagtgatcttgctgctgcattcggaaaatatcctaattgctctgctactgtccggatacgactctttgtctcttcactgatatctttttgatcgtttaacgccttactgacagtggcagttgatactccacatttttcggcaattgtttttaaagataccattgaatcctccaggtacttcttccagactttattgtataaggtgttatttgttaacctgttgcttaagtctttcgaagtttttacttaatcgttttcgcacctttaatatagctcttatacaagtggattgcaatagttttttgacatttcggctaattttacatttttttctctaaatttttgtgcattttttatgattacttctgttttttaaccgtttgcgtagcaaagtcttatacgttttcgtattttaagcttaatcatccagcttaaccctcttttgttgctttcttccatattatgttttgatttttgttaaaagtgctatttttgcttatttcaaaggattttttgttgatttttataattctgcaagatataattttagataaggaatatttacttaatcgttttcgttaagtaatatgcaaaacaaggaggctaaatcctctcctcgttcagaggaactcggattttttcttcgaaaaaacaaggaggatttatatgaaattcggatatttcgatgataatgcaaaagagtatgtcatcacttccccaaaaacaccactgccttggatcaattatctcggctgtgaagatttcttttcgttagtttcaaatacatgcggcggctacagcttttataaagatgcaaagctgttacgtcttaccagataccgttacaataatgttcccggagacagcaacggacattactactatattaaagaaggaaataccatctggaatccgggctggatgccaaccaagactgatctggattcctatgaatgtcatcatggtatcggttattccatttttaaaggaagcaaaaatgatcttgccgcagagctgacagactttgttccaattggaagcacctgcgagatcaataagctgaccatgaccaatcacagtaaagaagaaaaacatttttccattttttcctatgtagagttctgcctctggaatgcaatggacgatatgacaaacttccagcgtaactactccaccggagaggttgaaatccatggttccgccatctatcataaaaccgagtaccgggaaagaagaaaccattacgctgtttacgccgtcaatgccccgattgccggatttgatacaagtcgtgatgcatttcttggtgcatatggtgaaaattcggctcctgaagttgtcgtatccggctcctgcaaaaattctgttgcaagcggctgggctccggtcggcagccatcagttagatgtaacccttgccccgggcgaatccagaacttatgtgtttgttctcggttatgtggaaaatccggcatcagaaaaatgggttggcagaccggaagatggtatcatcaaccgcactcctgctgaaaaattattagaaaaattcaactcaacagaaaaagcagaccaggcacttgccgatctgaaagcttactggggaaaactgctcagccattttactgtttcttccaaagaggaaaagcttgaccgcatggtaaacatctggcaccagtatcagtgtatggtaacctttaatatgagccgttccgcttcctattacgaatccggcatcggacgtggaatgggattccgtgattcctgtcaggatcttttgggctttgttcatctgataccagaccgcgcacgtcagagaattttagacattgcttccacacagtttgaagatggaagcgcttatcatcagtaccagccactcaccaaaaaaggaaactcggacattggaagcggttttaacgatgatccactgtggcttattgccggaactgccgcctacatcaaagaaaccggcgactactccattctggatgagcgcacgccttatgataatgatgattccaaagcaacggatcttatggaacacttacgcagatccttccactataccatggaacaccgtggtccgcacaaacttccgttgatcggacgtgctgactggaatgactgtctgaacttaaactgcttctctacagagccaggcgaatcgttccagacctttggtccatcggaagggcctaatgcagaatctgtttttattgccggaatgtttgtccgctatggaaaagattacgtggaaatctgcagacaccgtggcatggctgaggaggctgctcttgcagaagaagccattgcagatatggaaaaaacagttttggatgccggctgggacggagagtggttcctgcgtgcatacgatcattataaaaacaaaatcggatccaaagaatgtgaggatggcaagattttcattgagccacagggtttctgtgtcatagcagagatcggcttaaaagagggcaactgcttaaaagcaatggaatccgttgaaaaatatctggataccaaatacggcattgtattattacagccaccttatcacagatatcatgttgaacttggtgaaatctcttcttatccacctggatacaaagagaatgccggtattttctgtcacaacaacccatggatctccattgcagaaactgttgttggtcgtggaaaccgcgcatggcaggtctacacaagaacctgtccggcatatatcgaagatatcagtgaaattcatcgcacagagccatatgtatactcccagatgattgccggtaaagacgctccaaacttcggagaggcaaaaaatagctggctgaccggtactgctgcatggacattcttaaatatttcccagtatatcctcggtattcgcccggattatgacggtttgatcgtagatccctgcattccttcctttatggacggcttcaccgccaaacgtgatttccgtggcacgacttaccacattgaggttgaaaacccggatcatgtagaaaaaggtattgcttccgttaccatggatggcaatgcgattgaaggaaatcttattcctgttgaccctggcaaaaaagaagtgcacgttaaggttgttatgggataaccggaggttatttaggcaatgtaggcagattttgtagctgctttataggttatgaaaggcagctataagattccatacacaagtcaatattataaagaaaaatcgtacagacaaatatgatgttcctgttcgcaaagctcacaaaggaaatcatatttgtctgtacgatttttcttttatttacactatgaatgacttgtgcatggacgctgatatctgcccttctttacgttatgaatacagccacaaaatctgccaaattacgttgttggctccggttttcaatatctttgcaaaacaaattcaaccctaacaaaccttattcctgcttgtaacatagacatgtccaatcccaaatattacggcaaatatgatcaaaaagtaatgtaacattgttataccacttagtaagaagatacaagtcggtataacagccaatgctatttgcttccagtaagtctgtttattaaagtaaagcatccagataatccaatatgagagcattagcactgcatttccaacaagataaataataaatgcatttatggaaggaaaaccagattcaactatgccaatattgaatatcataagaaacatgcatccataacgtcctatctgttccagaatattcataaatttattggtacatttatttttctgatccttcaccctgactgcatatataatattcggaattaaaagaagaatcactaaaaccaacccaaacgtacttagccagttcattccaagctttcctgctacaaaaacagatgttggaccgtctgctccaccaattatagatatattctctgacattattgtatcttccataaaataaatcaaaatttaacaactgacaaaaaatgtttttagctatattatctggctagtttcaaaccgattttattataccggcaatattgctttttcaagaagtcccttataaatcttctcaacatcataatccggcgtatactggtcaatcatctcgtagatctgtctcatcaaatttatcggttcttccaacatatctgctgtttcttctgcactacagccttttttatacttcttgatgataagctcaattttggcttccatttttccttcccgttttccagcatttctgcctttcaattctgattcacgcaaatcatccgcaaataattcccgtaatgcttgacacattcgtctctcctcctttaattctttccagttggcacgcataatggtatctgctagtgcctggtataattttgattctttcttttttccatactgttcgataaaattccggatttcaccacctgattttaaatcattgcgcagattgtttagccaatagttattttcttttgatagttttggaatgatgattagctgtattggaatcgaatctccaatcagatagtaaataccgttttctatattttttattgacatttttttgtcatattccaacttttgcagcattttcaccggataatggtaacatacaaatgtaatggtcagttccgttgctggtatctgatctacgtcacctgtttcggatttatagagacaggcatatccgtatgttttgtaaaaatcatcaatattcagtttgtcatccggtgatttgtactcaataatattatactgccggaagattcttccgatattctttttgatttttacatccttcttattctttaccaacacatcaatctgcattggtttcttcgacagcaaatgttccggctcaaattccagatactctgcttcatcttccagctcaatctgcaatgctgcgtcaaatgctggatgccattggattttgtcatcgtttgtgttcaatcattttccccctttatgatagttgaattttccgtgtttttcaatgcataagagatatttttattatgaaaaaaacgtgccctggaaaagacagtttaacaaataagttataaatatcatgcattaaaaatcttcatcaaaatggaatctcgtgccgaaacggctgtg

SEQ ID NO: 14345 - DNA, 4373 bp, Unknown
  gut microbiota DNA sequence
tttttccgatgagcatcatcagtgaaaagccacaggtcagcaacaggatcacacctgtagaaagtacacagatggacgccagtcctgctgcattatgtttcatccggaacatcagattcgatacactgataaaattctttgttttatagtaaaacttcggattttttttcatgcacttcaggataaaaatacttccggctgtaaaaagacaataggttgcgatcacaacaagcagaatactgacaaataatatgttgaccgcacccccgattgacttagcagacagtgccagcttatatcccgcagtcagtgttatgattccaagaataaatataggaactttcactttcggttctttttcccctgttctgtcactctgcagcagtgcgatcggttttccaacccggatggaagccacattataaatcagactgactgcaaaaaggataacaaataaaaccaatgtacttttcagtgcttccactgagaaaaacagtccgtttaccggtggctgattgatgatcttatagagaatgagaagcattaatttgttcagaaaagtccccatcataattcctgtgacaatgctgatcaaagcattaatgaggctctccgcagctaaaatataggtaatattctttttggacattccaagaattccataaagccccatctccttttttctcgcccttatcataaactgatttgtataaaaaagaaaaactgccgcaaagactgctacgatctgaccgctgatttccagtaaaatcgagataatctgtgcaccataaaacgcttccactccatctttataaatgtatggacaatacgctagtgactgcaaaatataataaatcatgacagtcatcgttcctgcaagcagatatgggatcagtgtctttttatttttctgcattccactgaacacaaattttgtcagaagcttatgattcactatcctctcctcctctcatcagaacggtcactgcgtcacagatcttatctaacagtgcacttcttgtcatatcaccgcggtaaatctgatggaatacttcaccatccttaatgaacatgacacggtcggcatagcttgccgccacattgctgtgtgttaccataagaatcgtctgacctgtctggttaatctcacggagctgctttaacaggttggtcgccgccttggaatctaatgccccagtcggttcatctgccagaaggatccttggatttgtgatcaaagcccttgcgatcgcagttctctgtttctgcccaccggacacctcataaggatatttcttcaaaagctccacaattcccagctgaccggcagtcttttccacttttgcatccattttcttataatcctctccagccagcaccagcggaagcttgatattatcttctatggaaaaattatccaatagattaaaatcctgaaagataaatccgagattgcttcttctgaaaatcgcacgctcattatcctttaatgtggtgaaatcttttccatccaccagcacttttccggcggtcggtgtatcaaggcttgcaaggatattcagaagcgttgtcttgccacttcctgattctcccatgatcgccacaaattctcccggctccacactgaaatgcacatctcttaatgcggtgacttcgtccccgcccatacgtgttttatatacttttttgatatgattgacttctaagattgacatatattttcctccttgtttgtaagactatcatagcaaaaaaggaaatgtagtgccctttctttggcttacatttccttgtcataatcttacatttttgtaagaaaagtatgttactcttttcaagatctacatattcacaagatctccctgctgcactttttcgcactgaagagtaatcatcacagtcgttccctctccctctttcgaagccacagaaatcccatgcccaagcttttcacacacacctttgcacagataaagtccaagaccgctcgccttcttatccatcctgccgttatatccggtaaagcctttttcaaaaatcctcggcagatcctcactccgaatgccgatgcctgtgtccttcacagacactttcaaaccatttacagattcttccgccgaaattttcacacttccctgctttgtgtattttaatgcgttcgataaaatctgttccaacataaaacaaaaccatttctcatctgtaagcactatataatccaaatgttccagctgaatggagatatgattgtagataaaaattgctgcatatttttttactacctgccggactaattgttccaatgaattacgctcaagtacaagatcgttgctcatttcttcaaaacggagataattcaatgccatctccacgtaactctctattttaaataattcctgtcggcatactgccgcatcctgcttttctccctgcaaaagaagattcaaagctgcgatcggtgtcttgatctgatgtgcccacaatgcaaaaaagtcctgcttttcctgtaattcttcccattgtctgctctcttctgaattgctttcctgcttttccttgctttctttttcatattgctctgttctcttccggaatccccggtactgcatacacaaagtggtcacccagagtatcagaaatatgcttgttagataaaagacatattctgccggaagctgatataaattggatactgtaaacatcaggagcaggaaaacaggagctatcaataataagcctatattttctgacaaaaattttatatgtaaaatttttcctgtttcttttttcatctgcatgtttttgctcattatctaactcctgtattttcgctaaaagaaaacaaactctctatgattctcttgctgcctgcgacgaaaatttcaacattatgctccaacaagatatccaagtcccctctttgttgtgataaaatcattcactcctgcggcttctaatttttttcgtattcttgtgatgttgaccgtcagcgtgttgtcatccacaaattcatcattgccccagaggcgttccatgatctcttcgcggcttaccacttttccctgtttttccattaacgtctttaagatcagaaattcatttttcgtgagatcgatcttctctccacggactgccgctgaagtatcattcagattcagtacaacttctccacattccatcgagtggcttgtgagttcgcttccatagcttcttcgaagtaccgcctgtaattttgcggtcagcacctgcaaatcaaatggttttgcgataaaatcgtcgccgcccatgttcattgccatcacaatattcatgttatcgtccgcagaagacaagaaaacgatcggtactttggacgttttacggatttccgcacaccagtaaaaaccgttataatacggaagtttaatatccataataataatgtccggttgaaattcttccacttcctctgttattttttcaaaattgccggcacactgtacctgcatctgccatgttgtaagatgtgccgccactgccctggcaatgacagtatcatcctccacaatgaatactttatttgctgccatgtcttagttccctcgtattgattttaaatagttcaagcgctctctctttgattttttccaaatcctcatatgttccatcagaaaattcttctttaatacgcatggaagccattgcatgactgtcattcactttgtctgcatctgccgttttcagaaatttccctaataattcccagtcacttgaataatacagttccactaattttgccctgtattccagttccgccggagtaatgtctggatattccttcaggtcttttgcgtgctgtgcttcatgctttaaaagtgaaacggtaaatttctcactctcaaaatcataggcactctcgatgcattgaatcgttccgtcctcagatgcccagccgccagttccgtattttccaaaggtcagataatccatccagctccgaaatacaaaaccttttaaaatatttaccgtatactgctctacgccttccggcaattctatctgataagacgtcggaaccgtatctttccagatgtatggtccaaaatacccttgcgtttttccgaaaagtgcatggtagcctttctgttcaaaaagttcctgcaatctatcttccagtgcgtctttctctttttccgatatagaaaaagtctggcacagctttcttatcagtttgtctgcggcaatttcttcatcactattgcaataaaacacgtctctgaaatattgctgatatgcaagcagtatctcattcagtattccatccacttcatattgccgataatgctcgttttcaaataagtcaatatattgttctcgttctttctcatattccg

SEQ ID NO: 14346 - DNA, 1289 bp, Unknown
  gut microbiota DNA sequence
aagatagaactgacagaggagacgccatttttctttacatattcggtatggacgaaaaaggaagcatacagggagcaggtaaatcgtttagtaaaaggatatgatcattacatatcgttaaaactcacaggtgatgacgcttatctttcggaaaaaatggtcggatatcctgcggaattggatgagatttatgcggaggactttgccgagcagaaaaaggagtggttctgttataatgaagatagagaatatccggagtttgaccttgcgatcacccttgaccgtccaaaattatatcaggcatttcttgaaaaagactggacgaatttctgcgaagattactgggaagaaaattttttggaacatcatccgcttcacaagaagagaataacgcggatttacgttggtaatcagttctgccacaacctgtttcctgagaaaaaacagttgtttcaaatattagataaggcggcagaaaaccagctctgtgtgacaatcgccttttcttatatcagggacaatttgctggaggagactggggaactgctgcagaaactcgaagtatggtgccagagcagagacctgggtatggctgacacgatcagggatgctgacacaaagaacgcagctttgtgtgaagaaagtgacagagaaagctcgcagataaagcttgaaattattgtaaacgactgggcgatgcctgcgcttttaaaaggaaaaacacatttgatcccggttttgggaattttattaaacaagcgcagaaaagatgtgcgtcttccttatgtcacagcaaaatccagagaagttttatgtgatacaaaaagcggcgccgggcaggagagcactgtggtggaaaatggtgtggatagactggcggaaaacaacttgaattgtggattttatcaaaattatttgaagcatacattcaatatacaaagatatgaatttgaatcctgcggttatcagatcacaatcccggaaggacgccacagcctgcatttaccgtttttccagacgaacacgtcgcagtattgcacgctttatgccgtttgcacatatggcgaccgtggaaaacagcatttgccggaaaactgtccgcggtattgtgaaacgaaggtgtttttatatccgaagcacctgaaaatggtggggagatacaattcactgtttggatatgatgatacaatcttgtgggatgaaacgctattaaaacaatatctggaaaatggaatcgaccgtgtggtattaaatatttcactttgatgtgttataggcaattgcctaat

SEQ ID NO: 14347 - DNA, 9009 bp, Unknown
  gut microbiota DNA sequence
aaatctttgattttcttctgacaagctctgcctgtcttgaatctttcaaggttattcactgttcagttatcaatgttctctgttgttttcagcaactctgatatattatcacaatcatctgtgcttgtcaacaacttttttattttgttttctgtcgtttagaagtggtttgttatcactcatttgcgacagctcgttaataatagcaaaccacttttcatttgtcaacaacttttttacaagtttttgacattatttttaatttattttaaagcatgccttccttaatcacattgtgatcacgcaatactttttcaataaccgttcctttcactacgcgaagcaaaggtttcttcaatgcgtttaatggtcccggcaatgaaatctcaagcggtgatttgccatccatcagcttcacactgctgtctaacagttcacggatatcgtaaacacttccccatacttctggtactccacggtctactcctaacaatccatatacagcctccattgcagttcttacggaatactctgttgtgaacacggtatctcttggagtttctgcaaactgacctaaaaatgcaaaattcacgcagccgtccggaatcacatccggtctgtcaccttttgttctcggcataaagaaagcggtgatatacggcatcattgtcggaacacagactgcactgtgttcggcaagttcctcaattttttcagtcggaacccccagatgatacagccactcttctgtaatctcttttccgatacattccttcatcggtttcttaatataatcacccggtacatcggtaaagagaccatatacccatacgcagacctgatttttatcctgactcttgaattgtccctgacggttgatcgtccagcttaaaagccagctggaatctttacagctcacgataccacctgttacgactttgccgcttcttggatctctcttacagatatccataatataaggaataattttgtcatctaacgtggtaacggttgcagattcccagtttgtttttgcaatatcagagcagaatttctccggatgtccgaatgacggatcctgttttgcaatatttttccataaattccagcagccgcttgtacgaacctctgcgtcaccgtttggtgcatgattctgatccccgtaaatagttccttctgtacagcttccgtttgtgacaaatacaagatcattttctgttaaggtaatgccctcttccacgccttttactttacactcgattgtttttgccactttctttccgtctttgatgtcgaaaataacattcgttacttctgtattaaactggaaatcaacacctgctgcttcgaggtatttctgcatcggaagaatcagcgattcatactgattgtatttcgtaaattttaaagctgaaaaatccggcagccctgcgatatgatgaatgaagcgctggaaataaagcttcatctccaatgcgctgtgccagttttcaaatgcaaacatcgttctccagtacagccagaaagtagaattaaatacttcctcatcaaatacatcttcaattgttttatcatagagatcctcgtcctttgtcataaacagcttcatgatctccatgcagcctttctggcttaaattgaatttgccatcggtatgtgcatcttttccctgcttctctgttgcacggcaaagcgaatagtttggatcttccttatttaaccagtaatactcatccagaacggagactcccggcgtctcaatggatggaatgctccggaataaatcccacagacactcaaaatgattttccatctcacgtccgccacgcattacataacctctggtcgcatcataaatgccatcacatgctccacctgcaatgtccattgcctctaaaatatggatatgatctcccggcatctgtccgtctcgtacaagaaaacatgccgctgctaaagatgcaagcccgcttcctacaatgtaagcacttttttcatcaacccctgccggtttctttggtcttgcaaacgcctcataatttccgtttgtataataaatgcccttgctgttcttttcattttttccgcgttccgtattgcggtattctttctcagcctcttttgctgccgtgtttttttcttccttttttactgtgttctgacgattttttgctgcgaatgctaccgctcctgctcccgctgctaatgcagctacacccattccaatatgtttcttttccatagataagtcccctttctatatgaagtttctccgtaatgttctgttcgttttttctttgctgctgcaacaaaattacggttttgttttttgatgtttctatcttagcttgcccaaaatcgttttccaatttacaaaaaaggcgaaatgataaaaattttatcacttcaccttttttgtaatcctcttccattctacgttcgatccagtcgagcatgatcccaacaaaaccatatttataaaaatctgcaataaactgtttgtcctcctccggaagatgatctctggcacatttttcctccacaacatccacgatgagctgatacgttaatttatatagaaagctttcgattttctcacgattcacagaatgatacacattcatgataaatggcttcttcttcaaaagttctttcaatgacgcttccagtgcaattttggttgtatttgacatctgcttctcctgtttttcgcttgctttatgagttccattttatctgcgttctccggtttggtaaagcctttccgtgattctttcataaaaatttcagagacattttatgtttttttattcttgacagaaaatgttagcagacttacaatttctctggtttcaaatgatgcacatttttgatatgcaatttgttattataaatgaaaatacagacattttgacacccgaattttataagaaaaggaatttatcaacatgacacaggaaaaacaggtaacaaatccactcggtacagataaaatatcaacgctcgtcgcccgatttgcagtgccaagcattatcgccatgctcgtcagcgccgtttataatatcgctgaccagctttttatcggaaacgcagtcggcacacttggaaacgccgcaacgaatatcgcttttccactctctatgctctgcacttcccttgctctgctttttggaatcggcggagcggcaagctttaaccttcacatgggagcaggacataaagaacaggcgccttattatataggaaacgctatcacaatgctgctctccctcggctttcttttattgtttgtcacagagctgttcttagagccattgttagtgctttttggctctccggcagacgttcttccgctggcagaacaatatgtacgtgtcacagcaatcggttttccatttctgatcttaacgatcggaagcggtcacctgatccgtgccgacggaagccctaaaatggcaatgtttgtcaatatctccggtgccgtgatcaatattgtattagacgcattgtttgtcattgtttttcaatggggaatgtacggtgctgcatgggcaactgtgatcggtcagatcatctctgctgcgattgcaattcattatctgatgcattaccgcactgcaaagctggaaaaacagcattttatcccttccggaaaagacctgatacagatctgttctttgggaatgtcttccggtatcaaccagattgcgatgatgatcgtgcagatcaccatgaataatctgttaaaactttatggtgcgcagtccgtatacggcgaatcaattccgattgcctgtgccggcattgtcatgaaagtaaaccagctttatttttccgtgatcattggtctgtctcagggcagtcagccaattgaaagttttaattatggagccagacagtataagcgcgtaaaagatgcctatctgcttgcagcatctgttggggcaaccgtatcgattgtctcctttttactgttccagctttttccgagacagatccttggtctgttcggaagcggaagtgaagaatatttccagtttggtgtcagctatttcaggattttcctgttcttcacctggttaaactttttgcagccgatctcctcaacctttttcagttctatcggaaaagcatacaagggaacttttctttccctgaccagacagattctgttcctgctgccgctcgtggttatactgccacatttcttcggtattatgggcgttttgtatgcaggaccaatcgccgatcttttgtcctttaccgtcggacttagcatggtgatcgttgaatttaaaaatattcataaacttgaaactgaagcagcataacgcagctcacattgaatgtaatttttttacatagtccaaaaatatttcattgtactaaattatttcatagtgcaaaaaggttgacataaggtatatcttatgtcaaccttttttatacttcatatttcatattaaacgcatctaattttaacgctgctatgattccagccataagacagatactgtttctgacaaaatcaattggtgagctgatgaaactgtcaaatggaatgatcatgagcgttgcagcgatcacgattccaacaattacatgaaatgccactgaataatgcttttcaaacagtgtattcactaattttgcaagtagaataatcgtgaaaaccgctccaatcccagccggaacaagtatttgaaaatcaagttttccaatgccagccacaaaaggctcatataatcctaatggcatcagcagagttgaaaaactcattccgggtgcgatcacgctgagtgccagacagaatccacaaaacaaataccacaaaaatcccggttcaatcgcgacagaaaataacttcaggctgatcagcaatacaaacacgacaagcattgccatacacatggaaaaataagatgtacttgttcttccttcttttccggcctcccgaaaaagtgacggcagcatgcctgtgatcagtcccacaaacacacagattgacggcgccggatatttttccagaaaaaacgataatatattcgcgattccaaggaatcccgctgctcctcctatgataaccggcataagccccggcagatgtgttttgtatgtatgaaacggatctgcaagaaattccataatcgtcttatagattccgaatacaacacaaagcacaccgccggatattcccggtaatacggctcctaatccgatcaacattccctgaaaaaattttaaaatgaattttgctgcatgattactatcctgttgcatgttatgaaatacctttctgatttttattttcgaaattgtaccagatatcatatgctgattcaatcgaaaataggcgtaaaaggtattccttaactatttcttagctgtttttacttcagcaccttctccagctcctccacaacgatcttgagagctttgatccgggcatatttcttgtcgacagactctaaaatatgccacggagcgtaggtggtactggtcttggcgatcatctcattgaccgctgtctcatatgcatcccacttgtcacggttgcgccagtcttcctccgtgatcttccactgtttttccggtgtattttgtctctcattaaaacgctcaagctgcgtatctttgtcgatctgcacccagaatttgataataacagctccccagtcgtgcagttctttttcaaactcattgatctcattgtaagcgcgcatccagtcattctcactgcaaaatccttccagacgctccaccatcactcttccgtaccatgtgcggtcaaaaatagcgatatgtcctgttttcggcagtctcgtccagaaacgccacagataatgccttgctttctcatgaggttccgggcttgcgatcggatatacttcatagccacgcgggtcgagtgctcctgcgatccgcttgatgttgccaccttttcctgctgcatcccagccctcataggcaatgatgacaggtacttttttccggtaaagacggttgtgcagttctccaagccgattctgcaattctttcagttctttgcggtactcatccgcctcaatctctttgtccaaaggcacttctgccaaaagtggcatccgcactaacggaaaaacattctgtaaaagaggcactgccagcttctgattgctcagcgcaatctcaatcccctgtgtcaatgtctctaaaacctgaagttccgtccattttctcgactttgcatcaacaatgtaccacggcgcagacggcagattcgtgttcttcatataggaagaaaatgcctcttcgcacttctcataatgccggttctgccagagatcatttttgctgacacgccagaccgtatctttttcatgctctaaatgttcgatccgttttgcctgttctttctccgagatatgcaggaagaatttcatgaccagataaccgttatcggtaagctggcgctcaaaacgtctcacactctcgattctttttgcataatcctcatcggaaagttttccgtgcagctcgtcttttacgatctcgtccatccagcccgaatcgagaaatacgaactttccttcttccggaatccgtctgaaatagcggtataaaaatggcttccggcactcctcctcactcttttcccccatcgattccaccttgaagaaacgcggatcgatattctggatcacctggccgatcacggaaccttttccggcggttccccagccttccatgagtacaagtaccggtatcttctgctctttgatcaaaagctgctgctttgctaacttttcttttgcagcggcaaggcgcaccctgatctcttcctcctccggtttttccattgctttccattcctgcagcataaaaaaatcccccttctctcacactttttcgtaatcaatccatatctccgcgatcacgttccgaagatgcacggatatctgcctgttactctgttgtcattcttcttttagtttctctcaaaatttccgaaacatcaaggcattttcacactttttatatttttttcagaatttgccagttttattcttctgcccatattttcatataccggattccttttataagcacttcttatgaattatctttttttcctattttttttgcataaatacaggaaaacagaaaaaacctccttgcaatttgtattcttacacgatatagttgaaacaacaatttcgagatgaagtttgcaggaaaacgacgcaagtctaccgaaggagtaacactctcaggtgccggtcataccggtgcaactgtaaatggatcgactctctggagacgcccggatgaaccgggggccgaaggtgcaacatacgttttcgtatgaatctctcaggcaagcggacagagaagatatcttaattgcacacataagatttcattttatatgaagttttctgattatgtatcttcctatcccatatatttttatatgggatatttttctgtcagttcatcctgtttccggtcatcatccattttctttgcaggatatttttctgtgatactgcatgcactcgatgtatatattgaaagaaagatagaggatttgaaacatgtggagtgtaattaatgattttcttgtcaatgttgacaattttgtctggggtgtgccattaatggtgctgatcatggctggcggcctgctgcttacggtgcgcctcggtttgttacagatccggaagcttccccttgcgctgaaatggatgatccagaatgaggaagaagccgagggtgagatttcaagctttgcagctctctgtactgctttgagcgcaacgatcggtactggtaatatcgtaggtgttgcaaccgctgtctgcgccggcggtccgggcgctctgttctggatggtcgcagccgcttttctcggaatggctaccaaatattccgaaggacttttagctgtcaaataccgtgtcgttgctcctgacggccacagccttggcggtcctttctattatattgaacagggaatgggaaaaaactggaaatggcttgcgaagctttttgcatttttcggtgtctgtgtcggacttttcggtatcggaactttcagccaggtcaatggtatcgcaagtgcgatcaacggtttctttgatccggacaatgcacactgtgtcaagatccttcctttcctcggagaatattcctggtcagtcgtgatcgcatccctgatcctgacggtctgtgtcgcagccgtattgatcggcggtgtaaaacggatcgcaagtgtgagccagatcgttgtaccttttatggcgatcctttattttgcttttgccgttatcctgatcatctgcaatattactgaaattcctgcagctattaaagtgatcgtaaccgctgctttcacaccgaaagctgttaccggcggtgctgtcggaagtatgtttgtcgctatgcaaaaaggtgttgcccgcggtattttctcaaatgaggcaggactcggaagcgccccgatcgcagcagctgctgcacagacaaaagaacctgtccgtcagggacttgtcagcatgaccggaacttttatcgacacgatcgtaatctgtacactgaccggactctccatcgtcttaaccggcgcatggcgggtcgaaggcttagaaggtgtggaagtcaccacttacgcattccagcagggacttcctttccctccggccgtgtcctcttttgtattaatgctctgccttgtattttttgcatttacaacaattctcggctgggattattacagcgaacgctgtcttgaatatttaagcggcggcaatttaaaacatgtgaaagtctaccgctggatttatatttttgcagtatttatcggaccatatatgaccgtcagcgctgtgtggacgatcgctgatattttcaacggactgatggctctgccaaatatgatcgcactgttcgctttgagtggggttgttgtcagggaaacaaaagcgttttttaagaaacagagttaggcaattgcgaaactccttgtag

SEQ ID NO: 14348 - DNA, 10681 bp, Unknown
  gut microbiota DNA sequence
cgacctcatcactttcaattaaacataaatcaactccgcttcctgctcacacaagcttctttgttctccacttcccggttttccagcgccataccatgccgacagcccgcacacactcatcgcttgcaagcccaatatacgctcccacagccataagtcccatggaaattccaaacagccatgtgcctcccaccgcaaaaacaaacatgaaaacggctgcgatcactgccgggaacactgcatctccgcttgtttttaaggcttgtccaaacacaagattcgtcacacgtccaatctcaagtacaatatcgatcgccagcagcttgcggaccagcgcagtcatttccggattgtctgtaaagagcggcataataaaaccggaaccaagcacaattgctgtctccatgcagactgccacacatactccgacaaatgccgcccgctttgtccctctgtcacactcttcgagttccccagcaccgatgtgccagcctgtcatgatcgcatttgcctgtgccagtgctgcaccgacacaataggaaaaattactgattgttgccgtataagatctggctgtcacattcagtccttctgcatccatctgattcaggaaacggatgacaagcatcattgcaacattatagagtgccgtctcacatgcagatggaagcccgactttcacgatctgccctaagactgtcttatttgcgatcctctctgtgctgttttttgcagagatcagcttatgtgaaaaatacagtacaatacacaggttcaggatcttggagatcacagttgctgcggcgacacctgcaacacccttgtgcaatacaaaaagaaatactgcattcatcacaaaatttgcgatatttccaacgattgtggcatataatggctgctttgtatatccgaatgcgcgcagatagcttgaaaagataggaatgaccgcatttaatatacacccacccccgacaattttaagataaatcaacgccggttcatacaatgcatccgcaattcctaccatacgaaggattgctcctgctcccgaaaataaaaatacagccataagcacgcctgcaacagcattaaataataatccaagctgccttgcctgataggcaactcccggtctgcctgcgccaatattctgcgtcatgaccgaaaccatgccggaagatatgatagaaaacattatgataaaaattccaatataactgtttgccgttcccaccgccccgactgcatagtctccaactgcggataacatcagagtgtcaaccataccggacagcatataaaatagtgtttccagacagattgggataaaaagtcttgtgagctgtttcatcttaagttatctcctttttctgttcatacttatccaatctattttatattattttcccctgaaaaacttgcactattttaaccagaaaaagtacaattctgctcattttataaaatatttctgcgttataaaaagctggaggccagataaaaatgaaattcgtcatatttcatcaggcaattccactgcttttcttacttcttccacccactctgcactatgacagcaaaacagttcttcatgctgcatattgtgcttccggatatccggatttttgaaatacgtacaatatctcttttcgtatttttcacccatcttggttgcgtaaaacacatggatcgttgttccaggcacatcaattccatgttggactttcgtaaccagatcagaatagaactgattataaatactctgtttcgtaatccatggacttcctcccttaccgattccaaacatatttaaaaatccattatataattcttttttgccaccgtctgtcttatccagctttttctgcataaattttggaagagtacctgtatgtaccattttatacataaaaggcactaccatggatgactggattttagccacaagatgtcctgcctcatccatgtcactgctcccaatgataccgtgatctatatggattcttttccgctggatcagaagggatacaaagcttcctccaagggaacacccatacgctgctttaattctcccgccatactttttcctgatttcctgctcaattttttcacattcatcttccatcgaataaaattcagttttctcgtttggatcaaatccatcataagaaactgttaccgtgtaaaaataagaatgtaatccatccagtacatgatcaaaactgctatacagacagcaggtgccgggaaataaaaatatcactggtttacgattatctccactttcataaaatttcatagctggtctcctttaggcttttctcacaacgcaatgcatcctcatacctttatggatttcaaatttttccacttttagtcctgcttttctgcagcattccatgaccacatctcttgttggaacccggacatctccgtgcccacatatatttgccagaggcatttccagtgtattcatcagccatatcaatattttattatcacttgtcacatccctcagtatcaatcttccatttggacgaagacatctcttcacactgtcaaaaaacgcctgtggattcggataatgatggaaactcatagaacaaataattgcgtcaaatcattaaatggctctttttctaattcttccagaatctccggataatccttcttacacatttcgtagataccagcatggttactttcatatcttcctgctgcttttgtaaattcgctgattgacaattttttgtattcttcgtttttcattctttcttcctccgatcacgtctgtagcataaatcaatcttctcctagaaatctggcttctttttcaatttcaaataagcagtcaaaacttgtgttagtctcttctaacccatatcttctaaaaaaccgtgtgaaaacaaaactgtaaatccacacggtttcttttcttatgcattcattatgtcactttaatctggtttgtcaaccagattttgtttcctgcttctgcgtgataagtcttgtatattctccctcatcaatatgatatttttttctaataataatgtaggatgcaatcaaggctaaaactggtataagtaccattcctattctgaaaagcaatgcctgtgatgctgtaatttcagcaataactttgtttgcttccactaaagcgctctcacttgtaagagagcctttgttcacttctatttccaatgcactgatagcctgacttctggcatatatgccacttattataagaactaaagttgataatccctgattgattccacccgccagctttacactgaaagaacgtaccgctgatataacagaatcatgtctttcatgaaatctggcttcatcatattcaatcgtgttattgatcatgacaatgattgccagattcataagtccctggaaaaagaatatgataaatccaaccgcattaagaagaatcacatttttcggcaatatataaccaaatcccatgaaagacgcatagccagccagtaaagcaataaaacagactctaagtatattttctcttgaaaaatgcctagcaagtgacgcataacttgcctgtgaaatcagcattccaagtccatacattaccgtaaaataaaataccagatttccactttctgaataaccatattctatgtaaaagaagtttacaccaaatataatgagaatattgcatgtaatgttaaaaaatatagaagcaattcctgcggcgaccagctggtcatttcttgcaaaaatcctatacatgtcctttaatgataatttctcgttctgctcttttcgcggcttttctcttattccaaatgctgtcagcatctgaaatccgacaagtgccaatgctactatcattgcaactattctgtacgcatttacagcatttccagcaattactacaggtactacaccggctacagagaactgaccgatgcacacaaaaatgctcatgatggttacaagggaatctctggtgtgtggatctgaactcagcgaaggcagtactccccaatatgcaatatcattcatagtgtaagtcatcccccacaaaagataaaaaagactgtagaaacagacaaatccccatccgctcggacggattgtaaataaacaaacgattacaatcgcattgctgatgcatccaattaaaatccacggtttgaattttcccattttaaaatgtgtattttcaataatgattcccatgagaagatcattcactgcatcccatatcatgcacacaaccattgctgcacttattacagcaaattgtgcactggtcagattcattgtatactgcacataaagaatcaaatacatgctcaccaatgcatatgctgcatcccggcctgtcgcaccaatgcagtaactccattttgttcttgcatctaatttttcgttcatactgttttccccctgttcgcagaagcaacaattctgctcattgtctttttctttataatgccgccactctggttgcatacactgtcaatatttccctcaagaatgccttccaacatcatccttgcttcaggatctcttagagattttggaaaatacatcagtcttacaagaatctttccaagtttaatccatctccttacaagccgggaatattcctgcatctgtctgagtgaattttttgtagtaaattcccctggctttaaatcagaaaagtgtgtgcgtgtttcctgataaatggaataaaaatctgtttccgaaagaggtacacctgtgctcttttttaagagaacattcatttctgtccctgtaatatccatttttccagtcaatcggatatcgttaagagatgcccctacctgaatttcatactcaccaccaatgacctgaaattcaccattctggtatacctgaaaagctctgtcatccaatacaacatccatctgtttcctttcacccggatttaagaatgttttagcaaaacctcgcagttctttattggtccggagaaaatcagcatcgggatttttcacatatatctccgaaatttcgctgcctgcaatggatccaatatttttcacttcaaaagaaatatggattttctcatcatcgcctgtctttatatgtaaatccgcatactcaaactccgtataacttaatccatatccaaaacaatatctgacaggtacatgaaaagtatcataataccggtatcccacaaaaatactttcacgatattccacctcatccagatgtctgttttgcccttcctgttttgcaaaatatccatagcttggaacatctttttcactatacggaatactctctgcgagcttaccggatggattgctaagtcctaagataatctttacacaggcgccagctactgcttctccaccaagatatagatgtaatagtgctttacattttgatggaagttccatgtcataaggcgaacctccaaaagagagaaatcctatcttatcgttcacttccagaagctttttaagcaaaaggatctgatttttcggaaggtcaaagctttccctgtcatatccttcaccttcagcaatatccgtcaagcctccgaaaaacaataccggtatatcatattctttcgcttctatagctttccttattgcctctttttccagtttcgcatctcttttaaaagaagtatttttataacctcttgcatatctgacttttatgccatattcttcaaactgttctataaaagaagtaattctggttgtatgaatatgactgcttccaccgccctggattctcggtttgtctgccaattctccaatcatcagtatttcttttatttcccctaatggaaagaaaccatcatttttaagaagtacaatactctcttccgctatctgttctgccagcttatgattcttctctctgataggatccggaatattctttttccctctgctctgtatcacattgctcttatatctgtcagtcaacctttctattctatcaacagagcattccagttttttcataaaacaaggattcgttgccgctatattccatatttcatcataatgattgccacagctgtcaggcatttctacatccattcccgcagatatgcattccggcagatcaacacaggctccccaatcactcattacaaggccctcatatttccagtcgtttctgagaatgtcggttaaaagatgtttattctcacaagccggtaatccattcaggtagttataacttgccattatggttgccggctttgcctttttcactgctttctcgaaagctctcagataaatctcatgcaatgctctctcatcaatcatggaattacttgtcattctatgtgtttcctgactattgcctgcaaaatgcttcagggatgttcccacgccacattcctgcattgcaataatataggaagatgccagttctcctgtaagaaaaggatcctctgaataatattcaaaattcctgccacacaagggagaacgcttcatattaactcctggtccaagcaccacagacacccccaatgcctttgcttcctgagccagtccttcccccatttttcctatcaattctttattccaggaacacgctgcactgcttgctgttggaaaacaggttgcttcataactgtcattattctttgccccatcttcctgtgcacgtattccgtgaggtccatccgaaacatgtatatcacctatatgccatgttccacgccccgtcacaagtcggcacatctcttccagacttttccccatataatacctccgtttcaatctgcttctctatacccaacttaacatctcttgtcattaatctatattaaatttatattgttatatattaaatttattatataatagatttatgaaaggggaaaaagatgtctggaaatgattcaactattaaatatgaatttttagattcatcaaagaattttatatacgatgccagagaaacaggaaagacacatacgtctttcctgtatgaactacagctttttaatgctattaagaatggagatatccatggtgtcaaaactgcccttgaaacctacactgactccgggctcatcatcggtcatatgtctgataaccagtcaagagaaatccattattgggctgtctctactatagcagtttccatccactatgctatattaggaggacttgatgaaagtgaggcgtatcagttaagtgacaaatatattcaggaaattgaccagctatcctcaatggatacctgtatagactatctgtgccagaaagcaattgaactcgtcacaaaagtaaaggtgaacaccattccacaagagtatagtcacctgataaataactgcattcatttaattcacatacatcttcatgaccgtctcaaaattgaaaacattgcacagaccttacatgtgtccagggattacctttcatatgctttcaaaaaagaaaccggaatccccctccataaatatatcctgcatcaaaagctggaggaatcccgaaaaatgctttcatccgggatatctataaaagaagtaagctacacactcagttttagtaatgaaagtcattttatacaatcttataagaaaaactatggtgttacacctgcagtatatatttcttcacttacaaaatagaaaactatttactttcatcgtctcttcctgcactcttccattctgcaaccacatttctcacccggtggtcaatatcaaggcgtgcactgcggcattcttgcggatattttcttgcttcctgaaatgccagtttcacaaaaagtccagaaccaaccgggagcattgtctttaacatgctctctggaaaaacgaaatgagttccatgttcataaatgacatactctggtctgcatgtgtgtggatgttctttcatgcgctgcttcattcgacggatatattttgcagtatcccacaacacatcatcttctgcaccgatcagcaataatgttccatggattttttcaatcttgatcatctcgtcttctgtgattggatgagccttttccgaatcatcaaacagttttcttgaattgatcatatcaccggtccgttttgtttctttttcaatcacatgccagtagtccggatgtttgtagcagaacggcatatacggaagcggttcacctttgtaagaaaaaagagattctccctcaatcggccattccttacagccgtcttttttgccctgcataaatccctgccagataaaatcactcggtgtcagaccgatcgtcaatgtaatatcttcaaaataagaagcggcagtcaaagcgagtgttcctgtagtagatgccccgacaattcctattttctgattaccgtgtacttttaaccaattgattgcattctctatgcgttccagcggataattatgatgtccataatccttttttccgggtgacatcgtcatcacattcacatctagtttatgcagccatttcacggatgtacgcgccagataatcctccgggtcatctccgatcatggcgatcattgcacagtctgagcctgttttgcatttccaatatgcaccataaaatccatctgtttccacatcaaaatgtctttttttcatctgcatcatctccttattatcagccacgtttctctaaaactattattttgtttgagatattccgaacgatcggaatctttcctatcacatgataaatcggcataagttctttcattccctcaaccagactgacttcctgttgaacagaaaattccggcacgattcttttcaattccattccattcttaactccccatgtgaattttgcattgcttccctctatggatttttctttcatatgctttacaacaaagggcgacatggtttcaaccattacagttaccttctgaaatgatttttcaataatagaaaatatctttctgatgtccttctcacacaaatacatcgtaagtccttcgattatgaccagaacattttctccatgataatcaatatcgtccacgtaggaatcatccattgcagactttgcaatctgatatatcggacctgtttctggaagaaactgccgccttatcttcatagtctccggcagatccacgttgtaccatctcagatatttttccttcatccggtagcatctggtatccagtccacatgcaatatttataacaactgtattttcatgcttttccagatattgccgaactatccggtctaatacgatcgttctcgcaatcacgccacagctcatggctttatccttatctgctttggaaaagtcatagtccagcttttccacaagttctactgcaatctcatccttgattttggcattttgcttttttgtttcttttgctcttgcatacaaggtctgtaccatcgtttccggcacacctgtcacattgactttttctttcatgtactttcctgctttcatatcaatacattggcgctcgtgttagttgtatctaacctacatctgataaaaaaccgtgtgaaaacaaaactgtaattccacacggtttcttttccctatgcattcagtatatcactttcatctggtttagcaaccagattttatctcacttttattgtgttacttgcaaaagacaaactgcaccagcagcatataaaatacagttccaccgccgatactgagcaatatgctcttttttctcatctgctttttcatcaccagactgcaatgattccattttctgtttcctcctgccctgcactttatttcggcacagaaaacataaaccatccttgatccacaccctccggtacttctgtcgtacaatttacggaaaatgtttcatcacacattccataaatcagataaaactttttccatccgacattttgatatttatccaacatggagattccataaaaaagatgtctggcattcaccatcaatgccaacaggaacgctgacagcggattaaatgctgacagcagcagattcgccgtgacaaattccatcgaacccgcataaataaacatactcataagcatcggatacaaaaatgaaaatcccatgctccgcatcagaaatccataagacattcctaaaaataagaatcctacacagactggcaatgtgtagggcaatgctgccttgaattcttttttcttcatgtaactttgttcctcttttcttgtttgtaacgcaatagcctttccatacccgattgcacagaattcctaccgacatactttactttttctaatttaacgcaaaaaaagaggtctgacaagatgaaatctattccttatggtaaaggccttgaatactgcttctgaaaaactcgcccacaaagaagacaatcccgccgaaaaacctgcaaaaaaatctgtccaatgtgtaaaagtgagattgccatcgatgcatgccgctgcccgatgtgcaccacaatccttgatgctaaggctgtgcaggagtttgaagcgaaaaccggagtttaacgagcgtagtatcacagattttgtggtgcttttacagggtgtgaagggcagatataagcgtcctctcacaagtcgtgattttataggtttatgaaaagaaaaacggtacagacaaaatatgatgttcctgttcgccaggcattccgataagcctctaaagagtcttatctccatggctcacaaaggaaatcatatttgtctgtaccgtttttctttcatttacgctgtga

SEQ ID NO: 14349 - DNA, 2494 bp, Unknown
  gut microbiota DNA sequence
tggagtttcatttttgagttctgccactcgtaacctggattgacggattttcacaatccggatgttgcatgctgctcagtctgggataaataaaaaatagaactgatttattttcaggattttgggagcggccggtccttagaaaacagacattgcgatttcaaaagacaatgtcaattggattttgaaatcacgatggctgctttcttagtaccgctgccagcgacaacaagcggaagcgctcctgaaaacaaacagttctattttttatgtttataaatactttgttggcatgcaatacaacataaccttaggaaatccgtaacaccactcacaggcggcagttcataagttaaactccggttatttattcataatcctgcggaacccagattccatcctcgctgtcaggctggatcatttttacaaaccgctctgcgccgtcctcgataaaagtgatttttatattgataccttctttcgaaccgtcctgcaacgcctccacttgtactttgttttcgttatccagcagattcaacagatactttgcagccaataccggatcctttagattctgatataacatagaactggaaagcagactgttcataaccaatgcatcatacatgccattgaccgtgtaatccattggcgtgccattaatttgcggatatgcctcatcaaattccgttcctgatacaatataatccagaaaacggatattctcatccgtcactttataacttccatctctctcctcaaacgtaatatcttctttccacaccgtaacatgtggatcagatgtccatgcatagtacaaaatctctgctgtgttttttccatcataggaggtcgtgatcgtataccccttcgaattttcatccgacgtatcccacattggccacgggcttgaccatccaaagatggtatctccttcgtcgatcacaagcagctactccttcatcattttttttcttgctccatccatgcacaaactgtcaatcgccgctccgtccctgtcacaaaatgcatccgcccaggtttgtaagaaactttgttgttgtgcccgaatcgcatcggactgcttttttaataaggcatttaattctgattcctgatcagccaaagaatccttctctgtgtttaacgtttggtcagtcagactgctttctgataattcggttgcaatattttcttccacattatcgttctttttcggattggtaagaaaaagtgctcctattatcacacagaaaagcaatgctgctgcaatcagccagaaggtcggctttttaaaattcaggattccctttactctctgtttcacacccacttctccaaatgctaacgggcagacggtgatcatttttcccgacacatggaacgaaagcaggacaagtgaatactcttttttctgctctgcgctccagtcctttatcacacgctcatcacatgccatctcaatgtcccggcaaaacagaatgtacgccagccagcagaacggattgaaccaatatactgcaaacagcacataaccaattggtttccacagataatccagacgcctgatatgcgctttttcatgtgccacgacattttttatctgaacttcttttaacgatgatggaagatatatccgaggatttaacactccaaaaataaatggtgtctggattctgtcacaaatatagatatttccctctatgcggacggattctctcactttcctgcggatatgtacgtaactgactgctgcatatacgagcaaaaccgccacaccgcataaccagatagatgcaatcagattcatcgggttttgcgccgtctcctgctccggaactgtgataccctccaaataatattttgcaagataccggtttgctgtgttgtctaaagccggcatttctgtcggagcctgcgatgttactgcacctgcttcaatgcttacaacctgtgcgtttggtgcgaggctaaatgtcgtctctaattgaaacgggcacagcagccggattccaaccagcgcccacaagatacagtgaatccacttcggcgatctcctcagcaggcagcgtgccagcaccacaaccacaatcagcacgctggcagatatactcatgttcaataattttaaaaagagtcctgacattttcagccctcctttccaatatcgtcgatcattttctttatctcgtccacctctgatttatttaatttttttctcgttgtgaacgctgccagaaatgccggaagggaacctccaaagttttcctccacaaatttttcactctgggcagcgtcgtattcctctttcgtcatctgggcggaaaccattcctttttcgttctgaaagattccccgctcgcacaacctctttaaaaccgtgtaagtggtcgactttttccaaccaagcttctgctcacataatttcaccagctcaccggacgaaagcggttcattgctccatatgatttccgcaaactgcgattctactacc

SEQ ID NO: 14350 - DNA, 2089 bp, Unknown
  gut microbiota DNA sequence
ctgtgaaatccacttcaaaatcttgttttatacttgtgtcatagtttcctaaatgaacgcatacagatatattttatacatttttccacaaaacaacaagaggttatcacacataaacacattttatcacagacgcactctatgatgcatctgaatatgcctatgcactgacaacctcctgtctttgcgcaatttattaattttagatattgaaagccaactgtgttgtacctctaatgatgtaaaccttcttatttgatatatccggcttttactaaaggattcttaatcatcggtgctacaatgatcgccacaatcatttttgcgatatcaccaattataaatgggatcacaccagccatcaaagctgcctggaatgtcatttctgcctcataagcaagccatgctgttccaagtgcataacagactgccgttcctaaaaccattccaacaaaatacatcactctttttcccggaaacttctcaataaaccagccactgatcattgccagaaaaataaatccgatcagataaccacctgtcggtccaaataattttgctgggcctgccgaaaaacttgaaaacaccggaactccaactaagccgatcaataaataaatcacataagacaccgttccttttttccatccaagcaatattacggtaaaataaattgcaagatttgtcagggaaattggaaccggtccgattggcactgataatggtcctaaaatacaggtaactgcggtcatcaaagcaatcattgcaatcgttgatgttgatatctttttctcattcattgttaacttctccatacacttttatttgagcaaccgttctgtctatcagtgaatacgtctgacacgcaaaaatagtgttactgtttatgcatacctcgttccagtaacgcttcgctcgtactcacttattctataaaatatcgtttcgattgtcaacctgtattttatttttagttaacattgttcatttaacaattattacacccatattcttgtaccaaattgtcagacatgataacacatcttcatcagcagggttctgttgatatccgtgattgtgtaagtaaaacaaataccgcctccctcgcaacccacaaaaaatgcggcttctttattgcagaggaaaacggtatctattatccttccaatacggttaataacaaaacttacggtatgcggtattttatccgataaagccggcaaatccgcataataacacgatgacaccaagaatgatacggtaccatccaaacactttgaaatcgtgtttcttaatatatcccattaaaaatttaattacaacgagcgacactgcaaatgcaacaaccattcccaccacaaggattacaccttcctgagaagtcatagttgcgttcatcaaaaactttgcacctttcaaaagactggctccaaacataaccgggattgcaaggaaaaatgtatattccgctgcaacagttctggaaattccaagtaataatgctccgacaattgttgctccagaacgggatgttcctggaaaaatcgctgcaatcagctgaaacattcctatccagaatgccagtttataatcaattccgacaagggtattcacctttgccttttttcctttgtgataattctcaatcacaataaatgctacaccaaacaggatcaacataattgctactgtctggtaattgtaaaataatgcttccaactgctcatcaaaaagtacacctacaattgcagccggtacacaggatactaaaatgtgaaaccacagtttaaatatatcccattttatatacgcacctgcgccagttttcgccaatggttccttgttatccttttttccaaatggccagatctgattccagaataaaattacaactgcaagaattgctccgagctggatcacgacttcaaacatactgtaaaattcatccgatacattcaaagacacgatctcatttaaaaggatcatatgtcctgtactgctgattggaagccactctgtaataccttccacgataccaaataatattgcttttaaaatttctaacattttttcttattgcgtctatctt

SEQ ID NO: 14351 - DNA, 6691 bp, Unknown
  gut microbiota DNA sequence
ctttcaacacaatttctaactgttcctatcccacttcccgcctatactccccaattacctcaagaaaccgctctccatacttcgcaaatttattttcgcccacacctgaaacgtccagcatttcaggcttggaagccggcatttttgctgccatatcgatcaaggtcttgtcactgaaaataatatacggcggcatgctttcctcacgtgctatttcaaggcggagtttcttaagccgctcaaacagcttgtagccggaagatgtaagtgtttccacactctttgctttctttttcgttttggcggccttttccggctgtttatcttcatctgtgatcttaatggaaacagaagcctctggatttttcaaaccactgatatcgccaagtttgaggacctgataatctcccacacgaagatatccctctaataccagctgctcgatcaaacgtcttaacagattcttgtttgttcctgccagaacgccgtatgacttgtagcgaacagctcctatttcctccagcctcgccgtcttagctccggcaacagtgtcaatgataatctgccttccatatcttcccttcgcttcgtatacgcagttgatcacttttttggctgcttctgtcatatccagagtttcaaattcccgcaggcaattgccgcagtcctgacatggtttttccggattttccccaaaatactttaaaatataattgcgcagacattctgttgtatagcagtatcgctccatcacctgcagccgccgggcatccctttccctgaccgtctccctgtccgccggatcgagatcctgcatttccttatgatccaataaaaaccggttgatcacaatatcctgcggtgaaaataaaagaatgcacttagcgtcaagcccgtcacgaccggctcttcctgcctcctgataatagttttccatactctgcggcatattataatgaatgacaaaacggacattcgatttatcaattcccataccgaacgcatttgttgcaacgacaatacttgtgtagtcgaatacgaaatcatcctgcatttttttccgctccacagcactcattcctgcatgatattttcccacagaaatccccttgctcttaagcagttcatatatattgtcaacatttttccttgtcgcacaatagataattccactgtcaccgctatgcccggaaatatatttcaaaatgtactgttctttattctttggcttttccacctgaaaaaacaaattttccctgtcaaatccatttaccaatgtaaagggattctgcagtcctaacgtgcaaacaatgtcttcgcggacggtttctgttgccgtagctgtaaatgcactgatgatcggacgtttctccaatgttttgacaaattcaacaattttcatatagcttgggcggaaatcctgcccccactgtgagatacagtgtgcttcgtccactgtcaccattgaaataggtacgctttttgcaagagcgagaaagccctctgtgacgagccgctccggcgctatataaataattttgtaaacgccctgtctcgctctcctgatcgtctcattataatctttttcagaaagcgaactattgataaatgccgccggcactcctgcctcatttaatgctttgacctgatcctgcataagtgaaataagcggcgaaaccaccaaggtgattcccggcagaagcaccgccgggatctgatagcacacagattttcctgcgcctgtcggcatgactgcaaaagcatctctccccgccaggatactgtcgatcacagatttctgtcccaccctgaatgaatcatatccaaacaaaatttttaatgcctgttcgggggtatggtatttgtcattattacatgtatcttttgtttcggtgtccgaagcattttttgataatattttcatgtgtcatcctaactaaaattgtgtttgttttatgttatgtttatttctctattcctttttctattgcatttgcaatcatcttcaatctatttactgttgctttagcatttttcatcgtgtatgttgtattttcctttgcagatgcttgtttattcatctctaaaacatctatctcatccgttgaaagaagagaaaaaacatttaaaatttcttcaagagaaggagaattatccgtcattcttaataacaaaaacatatctcttgcagaaatactttccaacatctcttgctcttttctaaaagtagcaacgattagttcaattaaattctgttctctttgctttgttgaaatcaactcttgtaatcttgattttccatcaggagattgaaatattatcgcaatctcctgcaaatttaatcccagttcttctgctttttttgctatatcaatcaattcctgatccgttattaaggcaacttttttccttgatgcaaagttctttattgtatcaccactaaatccagcacctataattgcaacataatcagcattattcttctctttatgagcatcgattgccacatcgctcacatcattatgtgaaacctgaccacttgattttgactttgcgtcaacgatagccgttactttttttccttcatcatctatccaacgtactactacatcagtatttcctggtccacctactcttttcgcttcaaaacccatatatctaaatacttttgcaatctcttcttcaaaagctactcctgaagcttttccctctgctaatggatctaatgctgctgcacttaatctctcaaacaaatcattttcagatggattcttttttgtttcggcaactatattttccttactatttatttcctccatatatacatttttatctgtcaatggaagcgtattcgcaaattccatgccaaaggttgttgcctttaaatgcaagtactgtggttcttctaataatccagcttcaaccaaaaaaccagctatccatcttgccttttcattattaagaccatattcctttgcttcttgataaatttcattccttgtaacatcgttttctgcaaaaagaatcatttctccgacaaaacgataatggcaatgcaaaatccttataaagtctatatccactcctgtttcacaccattccttggcaaccgaactggtaatatatatatttcttccaacttcttccagtaacccagaagccttcagaaatggcatcattgactctatactgcttaccttcaaattaaactcatcaccaatatatttaaacagctctatccttgttaccttttcacacgaatactctaatatttttcttaaattttcaattttatttggacttggagaccacaaattatatgtacaacgctctttctgtaataaattgttatcatataattcctgtatcatatttgatatttctgtcggagcctcgctaatcttgtaagaaacttcagcatcttcgaatgaatccagcatttctggagtaactagaatccattctttcaatgctcttttcccactttcagttactacccattttcgatttccaataatatcaataagccctaatacttctagccaatccattctttttcttgtattagaacaatttttccacttcaatttatataaatcacaaattttttcatcaacttcctgcacggtgcttggttcagaatctaacacatataaaatctctccaaatatacgaaacctctcttgcatcacacttgcaatattataaaatgacaaatttctatgtaaccattcgcctgtttctgataaacacaaacttccgttatgatttccaacgattccaattcctttcagaaaagggacatattctctccatgttctagactcaaagacaccttccaatttagggaaatcatccataccgtttgcattaccagatgcaatctgctggatcaatcctataacaatctttgtatattcacttttacttcctaataaatctggaatggaccatgatttttttctccacatattttttatttctgtattcatcaaaatcccccttatgccggactctttatcagcattccttctgctatcttacctgtatgattgtctgtatcattttttcaaaagattgagcaaagcgcacatcatcttcttctatacgttttctcggtccttttatatgatttttgtgagaacttcgtcttgcttttttgttaagatgcctctccatcaacatctggtctatattttcatcagtataccacttaccggattgatgaatggcgtatgcacctttcccaagtgccatggcagctaccccataatcctgagataccacaatatcacccttaagacaaatgctgatcagcttataatctactgcatcagctcctgctccgacaataatcacatcgctataatctgaatatagcacatggttcgtatcacaaagcaatgttgtcggaatattatatttttctgccaatgattcaacaatacccaccaccggacaagcatctgcatctactaatatctgcattattacctctatccatcttaattatcttgtcattgaaagtaagttcctaattttctcaatcaatgtaatatccgccggcaaccactctacattattcaattcatcctttgttaaccatcttgctgcctcatgctcttttagcacaagatttcctcttacaatttgacaccaaaaacaatccatagaaagatgaaactgtggatagtcgtactcaactgtatccatcaattctccaacagatacctccgtatcaagttcttctataatttcacgcttcaacgcttcctgaggtgtttctcctgattcaatttttccacccggaaactcccaaccgcctttgaaatcaccatatccacgctgtgttgcaaaaatgattgtttctccattctcgttaactgcttttataatcgcagcaactacttttactgtcttcatatatcctcccattaagaattcacaatgtactcataaatatcttctcgcaccggaacgtcaagtatccactctatttccactgctgttttctcggtatttgtcattgtaaattctttggtatttccacttgctgtcatatgaccaagataatagaactccttcgaaaccttgtcatccttgttttttcttacaaaaagttctacttgaatacctcgttcctttgctttcaaaaaattttgaacatcctccgactgtaaatttcttccagattttgaaatagcaatcaaacgatctctaaatcctggtataaaatgatcttcatattttgtggtatcactgatatcctctgctttatcataattaatgaaaacaggaaatgttttcgtctttttgtcaaacttataaccaccaatatttaatggtacttcgttttgctcccagttcaaaagtcggcaaacatcctcatatgtatatttctgatataaaaccaaatctgtctgatcataagtgttcttgtaatctccttcatatcgacttattccaaagtcaacaagttcctgaagcacaccataaaactcatcatttgccaacatctgcataaataattttgttggtttataatcatttccttcttgctccataaatacgcattgcgaatatgtctttttacttgctccagcaggaaatttgtttgtcataacatttacaatattctccttctggtcctgactgatattttttccatactctctcatatcctctgataaacccgcaaataaaccaatttttgataaaccatgagcgtatgtaagtattctctttagtatctgaagttcctgaatacgttttccattagccaattttttcgaaacaaattcaattactttttcttcatcctcagataaccggatcttatattctttctcatatttcaccagaaacttataatatgatccgagactattgttatcaaatattcgcataacatccatctcaccgtaatcatcaaaatcacgtaaacgaggaatgcgcccaagtttattctttaaatttgtgtaattttctttgataagcttaatgtcactaaaatttgcattgtctacagatgcaaaaattctttttctactaatctcatcaaaatgaaccgtggaagctccgggaatcactcttccgccttccataatatatctacgaatattgtccttgttgtaggttctatcccctgataatgcaattggaatcatgaaattgttattgtagttcccaatgaaatccaaaatgactacatactcttttccatttgcatttctaagtcctcgcccaagctgctgaataaaaacaaccggtgactgtgttggtcttagcataataacctgattaacctcaacgatatcaacaccttcgttcaagatttcaaccgagaaaatataatctaatggttgattctcaattgttgcatcttcttcattcatagcaagcctttcaaatacattctgcctctcctgttccgaggcactaccattgagggcaattgttctaaatttttttcctgttgatgggttaatcatttcattaaactttgcggataactcctctgtttccttaatgttgctacagaaaatcaatcccttcactttatccccactatatccgtaatagtcagcctgattgataatatgttttacccgttcctcactagcaagcattgagaaatcacgactagtatccccattatcaccaatgattgctaaatctgtaattccaaaat

SEQ ID NO: 14352 - DNA, 246 bp, Unknown
  gut microbiota DNA sequence
tgtaaatatcatattgtattcacaccaaaatacagaagaaaagtaatatacaatcagtacaaagaagatatcagagatatcatcaaaacattatgtaaatacaaaggtgtggaaataatagaaggacatttaatgccagatcatatccatatgctggtaagtatcccaccgaaatatagtatatcacagtttatgggatatttaaaaggaaaaagtgcactaatgatatatgacaagcacgcaaac

SEQ ID NO: 14353 - DNA, 1674 bp, Unknown
  gut microbiota DNA sequence
tttttgagacttatggcaaatctttagataaattagaaattgttgtaagcagtgacgaatataggattctggaactgcgggacagaatatacgaggctcttttgcagaaaaggtcagccgatacagaagaactgatccggcagtacaaagacataaccgatgaagagaagctgatacatcggcagtatatacagatggcagaggcaataagcaattataacaaagcaggaaaactgacagctgtattgcagcagcttaagacgtctcttcatcttacaacagcagagataaaaggacagaatatccatctttttcatcaggaaatttatctgatctatatgatattctggatgcaatatcaatgcggtgatacagaacggctgctggataatgcccggaagatggaacagtatatctgtgaacaatacacggatgaagaagaaaaagtgaagatttatccacagtgtatctggctgctcggaagaatccttctggatatacaatatgataaaaccgccaaatacacgataaataaagggatcgactgcctgacagaaaatggggcattgcattggctgacacaattgctagaactaaagaaagagtgtgaggagcgtctcggagagaaagcggaggcagaagaatgtgaccgttatctggatgcgatacggacactttatgaggttgccggtgaacgtcagaccaaggaaatctcattggctttatttatgcagagcagtacgcagagagagtgcattatcagcaattattttctgaaaaatctgcgggaagaaaaaggagttacacagtatgagatgagcgaagacatctgtgcatgggagactgtatccagaattgaatccgggagaacaccaaatcagaagaagctgtatcggttgtggaaaaaacttgggattgagcgtgagagatactacggattcatagagtcagagcattatgaagtgtatggatgggtgagagattataatcgcctgattgggaatgaaaaacgtcaggaagcagagatgctatttgaaagaatcgagtcagaacttgataaaaaaataccggttaataagcaatatttggaaagagccagaattacggaaaggttgcggaacgggcgaatttccaacgaagaagcaattgaagaatggcgaaaaatacttgcaataacgatgccgcctcttccatctggaaaaagaatatacagaataccgtttcgaacagaatttgcaataatgaaccagattgccagaacatttgcggcaatgggaaaatatgacagtgcatgtgaaatatatgcagaagtattaaaacaatatcataaaaatgaaagtacattgcgcggacatgtagtacaggggatattactatatgtctgttacgcggcaattctcgaagataataatgaattagagctgtcagaacagattgcaaaggaaggtatgaagtttacaatcgaatgtatgagaggagataccgcatgtaaaattctagccaatttaacctgcgtttatgaaaaacgaaaagaaattgaattggaaatgcggtatctaaaagatgcatattatttaagcagattatacagacaaggaatgttaacagatttattaaaaaatcgatatgctgaaaaacaaattagctgtcaacttcaggaatagtaagtgaagt

SEQ ID NO: 14354 - DNA, 3316 bp, Unknown
  gut microbiota DNA sequence
ataaagaggacatcagctctcttgttccgttgataatatctcgatagatacttgtcatttcgattgcctgacggttttccacaatcacatcatccagaagctctttatcttccgggtactgctccagccgtttatagcgcgtcagccggtcaagcacaaccccatttgcccggagggatgtcgcaaagtagaccagtgtggattccagttcatgcagattgatcagatcggagtcgtctgtatcgcttccaacacgttcttctatctcagtacgtcttttatcgatgatccggagatttgcctgataaattgctgccgtccggtaaaggatctgatacacaaaacgaagcttcttctttgtgctgaattctttcacccggctccgcacaaagttctgcaataccggtgtatcctccgtgcagattgtgacaatgatatcctgtgtcaggatgataccaagcggaattgtcgtgtatgttctctgatcatgacgtatctcgatggccgggatatccaccaatatcagcgtatatccatcctgcagttcaatacgggaactttcttcaacgtcgagtgcagccttcacgtcatcaatgtctaccattaatttctcagcaatttcctcacactcatcatgtgttgggttgatcatctgcacccatacaccatcacttaatttttcttcttcatgtatgacctgatcgtccgtcctataataagtcatcataattgtcacctgttcctgtatttcatcgcgttttctctaataaatatcataacacagtttttttgatgttactacgatatttttgtaaaataccttttcattttttgcggtcaggaagctgtaccagaatgatggccgcaaacattaatacacagccgatcagttccctgagagaaagcgtctgatgcaggataaggaatcctgcaattactgaaaccactgattccaggctcaaaattaacgatgcaaccgtcggattcattcctttctgcccgatgatctgcagggtatatgcgacgccgcaggacatgacacctgcgtataggatcggcatccatgcagcaagaatactcgtcagctgtggtttttccgtgagaaccatccctacaccagacaggattccacaggtgaaaaattggatacaggataatttcactccatccgcttttggggaaaaataatcaatgactaaaatgtgtaaggaaaatgccagtgcgcaaagcatcaacagaaaatcacctttctgaacagaaaatccactctctgtcatgcataaaagatataatccggctactgcgatcccaacgccacaccagactttaccgctcactttttttctcaaaaaaatcccaagtaccggaataaccacaatgtacattgctgtgataaatcctgcttttccgacagatgtatacatgattccaaactgctgcaggttacttgcaatacagagaagcacaccgcaggcaataccgccaatgaaaagtgtcttccgctctttgccatccattttttttgcaacttccgtgttgccttttccatttatctttcccaaaagggcaatgcatggaagcagtaccacacctccaatgatgcttcgcatcacattaaacgtaaacggaccaacataatccatgccgacactctgtgcaacaaatgccacgccccagatggtcgcagttaaaagtaataataatgattgacgtaagataaatttattcatactcctccttgtttgcggagcaaatgcgactgtccttacaggagcagaggattttgtctccctgttttctataacagaatagggcggcttataaagccaccctgcttaatcttcaaaaataagttaccattttcgggcaatttgtgcaagcatttccacagatttgttatgaaaaaactgatgcccagtttataaatatcttagaactgcttaagagattcttcactttccagtcaaatttctgtcacaaatttcctttaatataaaatcatcaaaaggagctgccggtttcaaagcagtttggggttggaacagttccgtctaaatacaattcctgtggacattattttttccaatgtccacagggtgaaaatatatatgggcagcatttcagagattgaaatgctgccctcctttttaatgtccgtcgccgaatttaaatccggtatctgacacgattttttcactgttctgtttcacggtatcggaagcggtgtaagcactgtcctcatacaaaaagatatgcagttcttttacattgtcgctcagatcacacggtatcacgacatcacctgtttttttgctcaaaaccttagttgtcttggtaaatggaaatcctgtggtgtctccaatggaatattggaaaacctgtgacgcaagcgctaacagttctgcatttgaaaaactggtctggatatcaccacatacctcattgatgagcttatttacggttgtaagatcggactgctgtgcttttttcaccatcgcggtcaaaaccgtacgctgacgctctgttctgcggtaatcatcacctcctccatatcggattctcgcatatgcacatgcctgcacaccatttaaagtatatgtgcctccctgcgtaagattctcggccttatttccggtcaattcgtttaactcccggatatatccggtcatgagagacgcctcatcatctgtgatctccatgtccacaccgccaagtaaatcgacgcattcgatgatcgagttgaagtcgactgtcacataatctgtaatgtttaaatcaaggtttacatttagcatggatatcgcctgctccggtccacccttagcgtaggcggcattgcatttctggaaaattccatctccggtatccaaataagtgtcgcggtagacagaaaccaattttacctcttttgtatcattattaatattggcaagcataatgacatcgctccgcccctgcgacaaatttccattggagcgattgtccagaccaaacatcgcaatggtctggtaacccttcataattttctgggattcctgcgaaatatcctcattgacctcaatcttgtccatatccagctttgttttctcaattttgcttaattttgacacaaaaaaaagaaccaccgcaagaataagcagcaacacgatctccacgataaaaattgtgttgcgccgccttcttgctgccgctcttttctgatatcttctgctgttttttctgtgattctgttcccttctcggatttacgttttctctctgactcatttttcatccccggctttctttttgtaatcattcagtactttaaatttatg

SEQ ID NO: 14355 - DNA, 3465 bp, Unknown
  gut microbiota DNA sequence
tcatgaaatagcaaagcagatataagagcagtaaatgcgccagatagaaaacatagaagaaatatttcattttccagccgtgggttccgttttctcccgtatccacagggttaaaatatatgggcagcatttcggaagtggaaatgctgccctcctttttactctcaattcatccacaaaattacacctattgcctgtaccaaaccatttcctgcagattacaccagaaataatcatctgtacagcctgctacatagcatgtaaacatatctccagccttgctgtcatcataataaaagctgagtcttgggcatagcccctgttgggagcggtccgtcagttcccatacatatggttcctgattacaaaatcctgtatttccagattctaacgtataaatataagcaccgtcttcctgaatacggaacgccataccccagctcggacaataccatgtgccaatgaaattcttttccattgtctcagcataatcatcaaacacatcaaagccttccacagaagatgcatctgctgtgatctggaaagacgcatactcactgtctgtgatcggtccagatttcactatattgctctgatccggtttaagttccgtatcttctattatttctgatactgtctctgtattttcagtgctctgattttttatgtcagtttctgtggaaatctctgtgccattatgatatatttcattctggctttcctgctgcttctccgtcttcattgcttcccattgtgtatgtatatcactccctgcacccacaaaaatcacaagactcaatactacaacaaagcaccatgccagcacgaggataaaaatagttaaaaatcttattcccttcttttttcctagtcccttccccttattttgggaacgtctcagaagataaacaatccttacactaaccaaaatccacaagcccactaaaagcagcgttgccccaataagcataaaattataataactatctgaacttcccacaacaaatgtccagattccataacctacggcagttgcagccatcaatattccaaaccaaagattcagatatggctctgtttttgtgtcctgttctgccatgatctcccacgtttttacagtgtccatcagcctggtctgatccccgcttctgaaaatctcctgtaattcatcatccgacagcttaacggtcttagaaggcaccgcagcgcaatgctccagttcgatctgccagctatcctccctggcacgaaatgatgctgctgcaagcagaaaataataggtcttcaatacattttttcccagactttctactgcaatctgggaaagtgcctgttttgcagccaacggtttttccatcaggatgtcctgcttggccattgtcagcagggttatactctttaagaaaaattttttattatgattttctcgatagatgaccagattataatcgtgcttttcctgcagcgtaaaatccttcatccgctttgcgacaattccattatggaaaatgcgaaaccccatcatagaaaacatgcatataacataaagaagaatgtagcttgaaagctttatttctatctgtggaaacagtattttatccaccataccaagagcaaataataacagtaaaatcagatatctgagcgcatactctctctttgccctgcgtatgcattttcttgccatttcaattccgcggttgtcgtacaattcgactgattcatttgtgtcatatatattcacgattcctgccccttttgtattatgtcaagcttgtatttcattttctatcaagagctaaaccgctgaatatccgctgattcccatgaaatagcaaagcagatataaaatcaataagtgtgccggatagaaaatatagaagaaatatttcatcttccagccgcgggttccgttataaaatgcgatcgggataaaaccgaacagcgccggtgtctcccagatgaatgatgcacatcctgcgatgagctgccacatttttttcttgcggaaaatgtataagaccatgatacagaatacacctttttcggcataatctgttttcaggaaatatgcaagcgccattcctgctgccacgatcaggatatacaagatcaccttcaacgcctgattccactcttctttttcttccactgcacggtaagcgatcatcgtcagcaaaccaatgaatagtgtaaaaaagacattctgataattgaattcgagtattttgctgctgaatgccagatcgaacggtatctctgagatcaatgcaaacagcccaagccgcatcgcatattttttcacatcatgcgtatgtagaaatccctccaccaacaaaaagcagaagattggaaacgccacacgtccgatcattcgcatgatcgtgtatgtccaatatagtgctccatttgctgaaagccacagcataattgcatctgcatttgtctggtcaagttcacccaaaccatttaccattaaaagtcttgccaatactgctgcaccaatatgatcgatcaccattgtcacgatcgcgatcatttttaaggtgcttccgctgattccttttttgttttccattgtttccctctttcttaacttacaaaaactgcataaagtaaaaattgtcgtgcgttaccgggcacgacaatttttgtttttaccattgcactgacatattcctgctacaacctagctgtgtaaactataaatgtctccgtatactagcctacaaattcagcaacacatcttctgtatgccgctaccggatcagctgcctgtgtgatcggtctgccgactacgataaaatcagagccaagctcttttgcttttgcaggtgttgtcacacgcttctgatctcctacatctccgtctgcaaaacgcacgcccggtgtaatggtaaggaatttttctccacatacttcgtgtacttttcctgcctctaatggagagcataccacaccgtctaaccctgcttccattgtattttttgcataatgcataactgttttgtcaatcggtttgtcaatccacaattcttcctgcatcacttcctcgcttgtggaggtaagctgtgtcacagcgatcagcagaggccttgttccgtctgctcttgtcagtccctcaattgctgcggacatcattgctttggttcctgctgcatgaacgttgcacatatcaacatcaaggtttgataatactgccatggattttttgactgtatttggaatatcatgtaatttcagatcaaggaaaatcttatgtcccatcttcttaattgttctgacgatttcaggtccttctgcataaaaaagttccattccgatctttacaaatggcttttcatcctgaaatttgcttaaaaagctcactacttcttctttgctgttaaaatcacaggcaataatgacatctcttcccataagttctccttttcactctggtttatccagtttttcttctatttt

SEQ ID NO: 14356 - DNA, 548 bp, Unknown
  gut microbiota DNA sequence
tcttgctatttgcgacaacgacaacaatgaaaatgggaataccgcttcctccggcataggcattgtagcattctgtggaatcatcagatacaggattgctgctgccagcaggaaaataattcttttggttaatggtttgcttgtgtttgttgccatagaaaatccccctttaaagtttattttgccagggtgtgcgtaaatgcacaaccaactgtgccatctttataaatcaaattaaaactatattgtacaagtcctctatactgatctgaatagctgccacacattacaggtacccacgatgatggtgtattcacacctgttgttccccatgggacactctgggaatcaactacctgattgtattttccgctattttttccaataccaacgcacacaattctggcattcggtgttccgataccatataaatatccgccagaggaagatgattccggatttctgtttttcgtaattgcaacattgttaatcaaaacatactcatcatttgaagacattgtatatcggataatactcgttgctgtcag

SEQ ID NO: 14357 - DNA, 188 bp, Unknown
  gut microbiota DNA sequence
taaaacttttaacatgagagtttgatcctggctcaggatgaacgctggcggcgtgcttaacacatgcaagtcgaacgaagcactttacttgatcttttcggagtgattgttttgtgactgagtggcggacgggtgagtaacgcgtgggtaacctgcctcacacagggggataacagttggaaacggct

SEQ ID NO: 14358 - DNA, 820 bp, Unknown
  gut microbiota DNA sequence
gaaaattttcagaagaggaggtatcagtttaaatgataacagatgcatttgacaattcagaggttttatttggaacaaaagatttttatggagaacaaaaacatttatgcgataagtgtatgatcgtattttcagaactgatatttgaatacatgcttgatacatatgagcatcaggaagttggtgtgataagatgctgcaatgggattacaccagtgtatgtttttgacatagagggaatgaaaattgccggatatttaagtcatatcggttctgcgctggcaggtggagatgtaatagacgtaaactggcttactggtgctgtgaagttcattatgttcggctcggcaggatctttagacagtgggctgacaacaggtaaatttgtgataccgacacacagttatcgggaagagggattaagttatcactatgcacctccggcagattacatagaggtgaaaaatgcaaaaacagtcaaagcaatatttgatgaattaaaacttccaaatgttttaggaaaagtctggacgacggatgcaatatatcgggaaacaaaagccaaatttgatgcgagaaaaaaagagggctgcattgctgtggagatggaacttgccggagttcaggcagtctgcgacttttacggatgggagttatataattttcttgttaccggggatgtgttggatcaggaagcttatgatgtttccgggcttgcggatgccaatcataatatggataaactatatgttgcaatcgagattgtgaaaagaatttgaaatagggaaggaggaagtgcttttgacacaaacgaagaact

SEQ ID NO: 14359 - DNA, 396 bp, Unknown
  gut microbiota DNA sequence
tgcaatagttcaatttattttaatatccatctacctgccaggcctgcggcaggaagtattcgctgaatttggtgatggcgtactggtcagtcatgcccgcaatgtaatcgcagatcacacgctccgtcttttccccttcatcaagcatggcgaggtatttttccggcagaaactcaatgtgatctttgtagaatccaaagagctgccggatcattgccttagccttcacttcctcacccttggcaattggattcgtgtatacatgatcgaacataaaatggcgcagctcaaacatggcttcctgaatatctgctgacatccggatgtcatcctgatgcatgctgttcatgatcacgttatgtatgagtgtatttaagcgctgttttgtggtaaaac

SEQ ID NO: 14360 - DNA, 9253 bp, Unknown
  gut microbiota DNA sequence
agaaagaagaatgtcggaaagccgtgtgagggagaacctcatgcacggtttgatgaggggcggatgaaattttcatccgcctactctacatgaatgtagccacaaaatctgcctaatttacgatatataaattgacaagtcacatatatgttatgataagatattgtcatacagatcggtatttgacgaggtgtaaattatgtttattacattgatttaattgtttatggagaaagctatgatttacttagtagaagcaactacgcaatttagtgacgagttagaagaatttaagcaggaaattattttgtatgatgcagataacgaagatcagtttgcaggatgtatgggactaagaaatacatctacatcagaggaatggattaatatatgtaaccttagaaaaagtgtggagacatgtgagcaagcaggaacaaaggtgccttcaacaacgtattttgcgataagagaacaagataaaaaacttgtaggagtaattgatttacgtcatcatattaatcatccgattttaggaacctggggaggccattcagggtattcagtcagaccatccgagcgtggtaatgggtatgcaaaagaaatgcttaggttgaatattcaaaatgcaaaagaaaaaggaatacaaaagatgttaatgacctgtgatgaaagaaatatagcaagtgaaagaacaatcatttctaatggtggtgttttcgagaaaaatattgaagtcgatggatgcgttatgaaaagatattggattgaaacgaacagataaatttcaatttttgaaactgagaaatcggtatttatagagaaaatcaaacagctaggagagcatttatttatgaatagttttacatatgcattggaacaaagaaatctggaagaattaagaaagtatcctaaggcagacttgcacaatcattttgtgcttggtggaaatagaatgtttatatatcagaaaactcgtaaaaaaattgagccattagttaatcctttgtcatcaatggatgagatgaatcaatggagtcaaaaatatattgatcaagattttaatagcactgcgatgagaaaatttttaatcagagcaacctttgaacaagccaaggaagatggagtaactgtgcttgaaattggtgaagatgtgtggggcttaaatgaattttttaataatgatattgatgagttggttaatgcttttacaagtgctcaaaaagaaatcgctcccgatatagaattaaggctccaaattggattatcaagacattgtccaatcagttatttagaagattgtttatcgcatttttggggaaataagaatttttattctattgatttgtacggtgatgaattagcacaacctatcgaaaattttaaaggaatttatcggcgtgcaaaaaaagaaggattaaggctaaaagcgcatgttggagaatgggggactgctaaagacgtaagaacagcagtagaggaattagaacttgatgaggttcaacatgggatagcagcagtcagcgatgaatcagtaatccgctttttggcagataataaaatcagattaaatattacaccaacaagtaatattttacttggaagggttgcagatatgtctatgcatccgattggaaaactgtatcgtagtggtgttgatgttactataaattctgatgatgtattaatatttgattcagatgtatccaaagaatatctacggctttatgagtctcagtgcttaactgcagaagaattagaaaacataagaaaaaatggactgaaacctataattgtatagacaaattcaagttatcaatctgtcctctagtttttgattaccttgacaataccaaaagcagattttataacggcatcctaatcgtaaagttggtatgtatcagggactttcacaagctattctcagtgtaaattaaagaaaaatcgtacagacaaatatgatttcctttgtgagctttgcgaacaggaacatcatatttcgtctgtacgatttttctttataatagccaataatattgacttgtgagcaagacacaactatcagcccacattccccagctaatctctggtttaatgcataataatatcggcatattgcccacgaactacagatagcagggcatccggattaacggtgatagaggttccgatgcgtccaccgctgatataaattttgtcaaagtttttagcactatcgtgcagaatcgttggaaactgttttttcatgccaagaggtgtacatccaccacgtacatatccggtaatggctgtaatatcctttacatggatcatttctacagatttttctccgaccgtttttgctgctacttttaaatcaacttcctctgcaatcggcaaaacaaaaacataatattgtttgcttttaccctgcatgacaagtgttttgaaagactgctctgccggagcaccggtagcttctgcggtgtgaagtccgtcaataaattcatcgcattcataattgatgatttcgtaaggtattttatttttgtcaagaatacgcatagcattcgtctttacttcttttcccataggtattacttcctttccatatattaacgaataagaatataatttctttcttctgtagtctaaccaagacatttgtatatgtcaagaaattaacaatttttatatgttactgtatgaacagtattttttatacttcttttataagctgtatatttacccgaaatgaaaagaatggtatgatattcgatagaaaaacaaactaataatcataagaatattttgaaaagaaggggaattaaaatgaaagagacattaaaaagaataaaagcggatgtcattttatctgcggtattgtgcgtggtacttggagtggttttaattgtctggtcagatgagacgatcagtgcaatctgtatgctgcttgcatttgggctggtagttatgggcgttgtcaatctgatcggatattttgccagccacagactgacttcctttaacggaatgttggggctgattctggttttggtaggtatatggctgtttgcaagaccagaatatattgcaatgattattccaatcgtgattggagtcatgctcgcagtacacggaatcagcgatatcaaaatggcttttgaaacaaaggcaaatggttatgagaagtggtggagtccgttggttcttggtatcatcagtcttgcacttggaattatctgcatcgtaaatgcatttggggttgtcagccttgcaatgaaatttattggtgttgcattgatttatgatggaatttcagatctttggattgtttcaagaactgccaaggcagcaaaggctatgaagcaggaagctgatgcacttgatgtagattacaaagaagtggatgattaaaccggaataaattataaaaagacattgataaattattcacaaaatgttattctataactgcatgtcagaatctaccttatatggcggttacggacatgacaaaaaatacatcatcatagaaaagaggaagagactatgaacaaaaagacgttttccacaaaatatcttgtggaaatggcattattagttgccatcattttactcatggcttttaccccaatcggttacatcaaaacagcaggattagaaattaccctgatcgttgtaccagttgcggtaggagcagtaacattaggaccggtagcaggtgcaattttaggaggggtattcggaataacaagttttatccagtgcttcggaatgagccagtttggcgcattgttgttaggaattaatccattctttacattccttgtatgtgtcccaacacgtattcttatgggatggcttacaggacttatttatcatggattgcgtaaaacaaaactcccggcaacagcatctgtaacaattgccagcctttgctgtccggtactgaacacaacatttttcatgggaacacttgtaacattatttgcagctaccatgcgtgagtcttttggtatgggaaaagtactgccatttatttttgcatttgttggtgtgaatggcgtggtagaagcaattgtatgtttcgttgttggaactgcaatttccatggcattaaagaaagcattacgttataactaaaaacggtaacattatctatgagcggcggttcgcgattgaaccgccgttttatattgtctgaaccgtcgtttttgtacttcaaaaagaactatgtattttctgagtattattggaaaaattagatttataggttataatagaaatcagacaagttgtgaggcagctttataaaataagacagtagtcgtgcctcacagaaacgaaggagggcgtaaaaatgccagaaaacagcagttgcagcagtacatctacctgtagcagggaaagctgcgagggatgtccaagcaaagcaaagggtggaagcggaattgcaaaagaaccaatgaacaaagcttccaatgtaaaaaaagtgatcggcgttgtcagtggtaaaggtggagttggaaaatcatttgtgacatcttcccttgcatgtgccatgaacaaggctggatataaagtgggaattatggatgctgatattacagggccgtccattccgaaaatgttcggagtacatggacaggtttacggtacagaggatggcatggttccaatggctgcagagaatgggatcaagatcatgtccgtcaatctattgttagacaacgaagaagatccggtgatctggagaggaccggtgatcgccggtgttgtaaaacagttctggaatgagacagtatggggcgatattgattatttatttgtagatatgccgccgggaaccggcgatgttccgcttacggtattccagtcacttcctgtagatggaatcgtcgttgtgacatcaccacaggaattggtacagatgatcgtgaagaaggcttacaatatggcgaatatgatgcatatcccggtacttggcgttgtggagaacttcagttatctggaatgtccggactgtggtaaaaagatcaatgttttcggacagagccatgtggatgaagcagcaaaagagctaggaatcccggtatttggaaaactgccggtcgatccggcttacgcagagaaagcggatgaaggaaaattctttgagattgacaatccgtatttagcagccggtgttgaaactctgaaaaatttataagatgtagaaaaggaaggtattgcatgcgatatcttccttttctattgtatccaatcaattcggaaccggactgccaagcgcaaaggcaaaacagaaaagcagaataaggcagagcggatatgcaaacgcgagcaatcctgcaaacaaaaaagcatgtttgtgtgtggacttcttatgacttaaccgtaaaaaccatatgccaagaaaaaataaaataataggaaggcatacaaatagaaaaccgaaggattgcattatgtcaaccagaaatatcagtgcaatcaacaggacgataaagagtgtcacaagggcgatgcgttgccgttctatttttctttcgtaagatgcaagatcaatcacgttttgaaatgcatctgtggtatctggagcggaaacggttgtttttggcagacgctctgatttcatcagttcaagcaggctgatatcaagaacatctgctaatggttcaagaagtttgatatcaggaaagccaacaccacgttcccactttgagacagctttgtcggtcacgttcaatttctgcgctaactgtgcctgtgtcaagcccttttcttttcttaattcagtgataaaaattcctaatttctgattatccatacaagttctcctttcgatgtttactgatgtactatattgtgaaaaaatgctcacttttgccttcaggcaaatgatacgatatgcaaaaccagctacttatatcttataaaaacctcagaaaaatagcaatcgacgaatcgtagagcccccttttttacgtcttatcaccgaaaaattacctcttacctcaaatctatttacaggatctggggcatcgaatatactaaactcagttaagaaatcaaagagagctcgcataaaatacattaacagtttagacatataaaaatcttaagacgagacaaaaatcagcaattgaaaaatgacaggggagaaaaaagaaagcgaaatattatgaaaatcaaaattgaaatcgatgagggactcccggaggacgaagtgctgatccggtgcaggggactgacggaacagattgcggatgtgcagaaggcggtgagcgaagtgatcaatacctcgcagaaattcgttttttacagaggaaatacagagtactacctgaccttggatgaaatcctgttctttgagacagacagtgatgggatcaatgcacatacgagagacaatatttaccagacaaaatacaaactttacgagcttgaggaacttcttccgggaagttttatgcggatatcgaaatctgcaatcgtgaataccagccacatttattcgatcagccggaacctgacggcatcaagtgtggtggcatttgcagacacacacaagcaggtgtatgtctcaagatactattacaaaccattaatcaataaattagaagaaaagaggttacatcaatgaaattaagaaaaaacagtggaaaaattttatggggattattttttatccttgcagcagtttatgtggtagtcagcaaactctggattatgccggaagtcagtgttttcagcattttattgacggtattttttatctggctctttttaaatggtatccgcaatgtgaacttctgggaaatcctgttttccatcgcatttatatgtatcatatacgatgaccagctcggaatcacagccctcacaccgtggacagttttaggtgcagcattactcggaagtatcggactttctttgatcttcaaaaaaaagagcggacacagcccttccatttcttttgagtatgacagtgacagcgacaacgaggatgagaagtacattggtgaaaatatcaaaattgataacaattttggcacagccatcaaatacgtgaattctgataacttctgtatggcggacgttgataacagctttggttcgcttaccgtatactttgacaatgccattattcagtccggaagtgcaaaaatcaaagtggacaacagctttggcgaaacaaatctttacattccgaaagaatggaaaacagagaacaaccttggtcaggcattcggaagcgtcaaaacacatggcgtatgtgagggaagcagcaacaatactttgaaattaaaaggtgaaacaagctttggtgagattaacatatactatatctaaaaaaggaaagagagaaaatttgtgatccaatcggagcatgagttctgatgataaatggtaaaaatataaacagggattaaggcaggtagaagacatggatgaaaaaatatttttggtagaagaaatcaaagatatcaatcttgagattggtgcagcaaacttatttttgcagagagcagaaaatcaggatgagttgaaagtgattttggcaaaaggtgaaatggcacattttcatgttacaaaacaggaaaatcagttagagatgagctataagaaaaatggaaaaatttcgagggaggaaaccgatgagatcatcgttcaaatcccggaaaaccatcatttggaaaacatgtcagtttccattggggctggaaaactgaaagcagagaatatcacggtcatggaaagactgggattggaagttggagctggaaaagcaaaactgaaaaacatgcatgtaagaaatctggcgatcgaatgcggcgttggaaaatgtcattatgaaggtgttttagaacacgatatgaaagtgcagtgtggtgtcggacaggtagaggcagaactggacgcagaagaaagtgactacaattatagtatatcctgtgcacttggaaaaataaaaatcaatgataattccatgggaacatttgcatctgaaaaaacaatccagcatgcgaatgcaaggggaaacattgccctcgaatgtggactgggaaatattcatgttacaaccagagtttaggtgacgtagtattgcagattttatggtgatttcttagtatatgaagggcagatataagcggcatttcacaagtcaataatgaaggttttatacaaaggaaaaacgtgcagacaaatatgatattcctgttcgccaaacattccgacgggcttctgaacaaaaattttgtgaagcaaaggcttcacaaaatttttagaatcccatctccatgtctcacaaaggaaatcatatttgtctgcacgttttttcttttcatttacattgtgaatgacttgtaaaatgtcgcttatacatgccctgatttacactatgaatcgcactacaaaatctgcaatttacgttatgcatctcccgattatagaataaattcttactacaaactggaagttggatagaagaaccaatttaaagcaattctacatcaatattttcagcatcaaaaatttcttttactttatcaaaattactgctcattattgttgctttcttaagatttggaaattgtcttatttctgaggaagttaggttgtttaaatcaaagcattcatcttctccatcccattgtggaattatattcatataaacttcattcccaccatccatgtcgattttttctacatattgtgcaaattcccttggaatagataattctctaaaaaaattaagcgccggttcaattacagtatagctatctgtatttatctctaattctttatgttcatcagcaaaaccataaatatcaaatcgaggctttaataaattcaagtcgtacatcaaaacttgaattatcgcaagtttaagatttaaattttcaaactgtaagattccttctgtaatattatcatctaattcaacttctttttttcttccaaacagtccgaataaccccattttttgtttctccaattattatatttttcagtataaaaattttgccataccattttttcttcaaataaacagagaattgtcagctaatctgtgccttgatttttatccctatctgtcctaattgatcttgaactacttgcaaaaatttctggcagttatctgttatgttatacttgaaatggatttctatcatagccatcttaaaatcagcattggggtatatttcatcgtactgttcgctttcgataaaagccacatacgcattgattttatcttgtaaaatcttca

SEQ ID NO: 14361 - DNA, 1344 bp, Unknown
  gut microbiota DNA sequence
aatggaatagattgtacgtgattttgtacaaagtgaatgaaaaacatagtcgaaaaataaatatagtgaaaaatttaacaaactcatgaaaaacacttgaactttatacagaaattggttaaaataaagaaagcttgggaacaatagttttccaaaagtatattttatacaattctaggaggaatttaaaatggcagtaagagtagcaattaatggtttcggccgtatcggtcgtcttgctttcagacagatgttcggagcagaaggatatgaagtagtagcaatcaacgatttaacaagccctaaaatgttagcacacttgttaaaatatgattcttctcagggaaaatatgagcacgctgatgaagtatcttacacagatgattctatcatcgtttgcggaaaagaaatcaaaatctacgcattcccagatgcaaacaactgcccatggggtgaattaaaagttgacgttgtattagagtgttctggattctacacaagcaaagagaaagctcaggctcatatcaatgcaggtgcaagaaaagttgttatctccgctccagctggtaacgatcttccaacaatcgtttacaacacaaaccataaaacattaaaaccaacagatacaattatttctgcagcttcttgtacaacaaactgcttagcacctatggctgatgcattaaacaaatatgcaccaatccagtctggtatcatggtaacaatccatgcttacacaggtgatcagatgactcttgacggaccacagagaaaaggtgatttaagaagatcccgtgcagcagcagttaacatcgttcctaacagcacaggtgctgcaaaagctatcggattagttatcccagaattaaacggaaaattaatcggatctgcacagcgtgtaccaaccccaacaggttctacaacaattttaacagcagttgttaaaaaagctggtgttacaaaagaagatatcaatgcagctatgaaagcagcagctaacgagtctttcggatacaacgaagacgaaatcgtatcttctgatatcgttggaatgagatttggttctttattcgacgctacacagacaatggttaaccaggtatctgatgatcagtacgaagtacaggttgtttcttggtatgataacgagaacagctacacatctcagatggttcgtacaatcaaatacttctctgagttagcataatcagaatgaaacattcactgcacggtagactacttttttaagcgacaggctgccagagtgcagataagactcagcaaaggggtccggtctttttggaccgggctcctttttgctattgaataaaaataaaggagact

SEQ ID NO: 14362 - DNA, 1198 bp, Unknown
  gut microbiota DNA sequence
ttcgtgtactttgcagatgtgacttcaatgtacctttgaaagatggaaagatcacagacgagaaccgtcttgttgcagctcttcctactattaagaaattaatcgctgacggcggaaaagtaattctctgctctcatttaggaaaagtaaaaacagaagaagataaaaagacaaaaacacttgctccagtagcagtaagactttctgagttattaggacaggaagtaaaattcgtagctgatccggaagtagtcggaccaaacgcaagagcagcagtagaagctatgaaagacggcgaagttattttacttgagaatacacgtttcagaccggaagagacaaagaacggagaggcattctccaaagacctcgcttctatctgtgatgtattcgtaaacgatgcattcggtacagcccacagagcacactgctctaacgtaggtgttgcacagttagtagacacagcagttgttggttacttaatgcagaaagagatcgacttcttaggaaatgcagttgagaatccggtaagacctttcgttgcaatccttggtggtgcaaaagttgctgataaattaaatgttatctctaacttacttgaaaaatgtgatactcttatcatcggtggtggtatggcttacacattcttaaaagcaaaaggatatgagatcggtttatctttagtagatgacagcaagattgattactgtaaagaaatgatggagaaagctgagaaacttggtaaaaaattattattaccggttgacgctgtaacgatcaaagatttccctaacccaattgacgctcctgtagaagtagaagtatatgatgctgacaaaatgccggctgaccgtgagggatgcgatatcggacctaagacacaggctctttttgctgacgctgttaagacagctaaaacagttgtttggaacggacctatgggtgtatttgagaacccaacacttgcagcaggtacaatcgctgtagcaaaagctttagcagatacagatgctacaacaatcatcggtggtggtgattccgcagcagcagtgaaccagttaggtttcggtgacaagatgactcacatctctacaggtggtggagcttctcttgaattcttagagggtaaagaattaccaggcgttgcagctgcaaatgataagtaagagcagcatccgcgtaatatatatatacattc

SEQ ID NO: 14363 - DNA, 824 bp, Unknown
  gut microbiota DNA sequence
actggaaaatgaacatgactccaagccaggctgtaaaattagtagaagagttaaaaccacttgtagtcagtgatgatgtagaagttgtttactgtgtaccagcaatcgacatcgttcctgttgtagaagcagtaaaaggaaccaacgtagcagttggagctgagaatatgtacttcgaagaaaaaggtgcatatacaggagaaatctccgcagagatgttagtagacgcaggcgtaaaatatgttgtattaggacactctgagagacgtgattacttcaaagaagatgatgttttattaaataagaaagtaaagaaagctttcgaaaaaggtcttacaccaatcctttgctgtggcgagacattagagcagagagagatgggaatcactcttgactggatccgtttacagatcaaatctgacttaaaagacgtgacagcagagcaggttgcttccatggtaatcgcatacgagccaatctgggcaatcggtacaggtaaaacagctacaacagagcaggctgaagaagtatgtaaagcaatccgtgagtgcatcgcagaagtttacggaacagatacagcagagaaagttcgtatccagtacggcggttctgtaaatgcaggaaatgcagcagaattatttgcacagccagacatcgatggtggtttagttggcggagcaagcttaaaagctgatttcggcaagatcgtaaactacaaataaggtgaattcacagagagtttgtgctaattaccggtaaaaagtaatttcacagagcaatataaaacgggttttttatcagaaatggtagaaaacccgtttcaa

SEQ ID NO: 14364 - DNA, 3368 bp, Unknown
  gut microbiota DNA sequence
ttcagtttcgcggatagtagctataggaataacaatgttttaatattttacgacggagaaatagaatgtctgaaaagtgcagaaaaattatatatgcacttgtagtgacagtatttgctgcttttttatggatgatctgctgtgagaatgaccggaaagtgaccgatacagttatcggggagacaacagtacagagtatgagttctggggaaaagtcagtttcactggaacagagtgatataccgaaaatagaaatcgaagatctgacagatgcatttactgtgattttacagtatgctccgaaagatatgcttgcaggctgtacggtggatgaatcatttttgatgtggttttatgcgcagtatggcagggatgcagtgatacacattgcatttgatgtgctggatggcgggaatgacccggatgtctggtatgaggaaaccggaaattctatccatgtgctgtggctgctatattgcagggacagtggatttggacagcatgaactggaaaacgtatattggatgcagacagcggttgcctcggaaatggtatttggattcgccggtgatattaatttcgcagagaactggtatacaaccgagtatatgaaagaacagccggatgggttgcgggattgcttttcagaagatttacttgcgcagatgcagggcgtagatgtgatgatcatgaataatgaatttacctacgcaaataaaaaaggggcaacatcagtttacggcaaagcttacacatttcgtgccgacccgcagaaagcagaattgttggaaatatttggaaccgacacagtgacactggcgaataatcatgtctatgattatgggaaaagaggattactttccacgttagatgtattggatcaggagggcattccttattcgggcgccggaagaaatctcaaagatgcatcgaaaattatttattatgtgatgaatggacgtaaagttgcctttgtatcggcaacacagattgagcgttccaaacagtatacaaaggctgcaaccgaaacggaaccgggtgttttgaaagcgttacatccggaaaaatttttgaaaatagtagaggaggcagcacaaaacagcgactatgtgatcgcagaagtgcactggggaacagaggggatgctttatccggatcagtcacagcggcatctggcagaacagatcgcacaggcaggagcagatgtgattataggaggacatccgcaccggcttcagggcgctgcctttgtgggtgatgttccgattgcatatagtcttggaaatttctggttttccaccggaacattgtatacaacactgtcaaaagttaccattacagaggatggaacagtaaaactttcttttgttccttgtatacagcagaatcttacaacaaggattcttacagaaccggaagaacgatcagatttttatgaatatctggcttctgtttccgcagatatcggaattgatgcggacggggtggtttatcataaaaatgcggatgattatcctgcaggagagattttatatgactctgatacaagccggacagatattatcggtatggctgataatgagggagacgcgattgatattgtcggtaacctgagagaagaccggtaatttaattttggaatagtgactgcagattctaaatctatggtttcctatagataaatgagatatgtgtcgtacaggcacctcaaagtttaagaagaagagaggataagaacatgagtaaaaaacctactgtattaatgattttagatggatacggtttaaatgacagaacagacggaaacgctgttgcacaggcaaaaacacctgtcatggatcagttaatgaaagaatatccgtttgtaaaaggaaatgccagcggtctcgctgtaggtcttccggatggacagatgggtaactctgaagttggacatatgaacatgggcgcaggaagaattgtatatcaggagctcacaagaatcacaaaagagatcaacgatggtgatttcttcaaaaatcaggctttattagacggaatggagaacgtgaagaaaaataattctgatcttcatttatatggacttctttctgatggtggtgtccacagccatatcacacatgtttatggtttactcgaactcgccaagagagagggaatcaagaatgtctatgtacactgtttcttagacggacgtgatacagcacctacttccggaaagggatttatcgaggcactggaagcaaagatggcagagcttggtgttggtaagattgcttctatctccggacgttactatgctatggatcgtgataacagatgggatcgtgtagaaaaagcatacaatgttctcacaagaggagagggcgaacaggcagagagtgcagttgcagcaatggatgcttcctacgcaaaagatgtgacagatgagttcttcgttccaacagccatcacagagaatgggaaaccggttgctacgatcaaagataaggacacagttattttctttaatttccgtccggatcgtgcacgtgagctcacaagagcattctgtatggatgagtttgatggtttcgagagaggcgcaagaaagaatgttgcttatatctgcttcacagaatatgacgcaaccattccaaacaaagaagttgcattcaagaaggtagaactgaaaaatacatttggcgaatatcttgcagcacacggtatgaaacaggcaagaatcgcagagacagagaaatatgctcatgtaacatttttctttaacggtggtgtagaagaaccaaatgagggagaggacagaattttagtaaaatctccaaaagttgcaacttatgatttacagccagagatgagcgcaccggaagtttgtgacaagttatgtgcagcaatccgttctgaaaaatatgatgtgatcgtcattaactttgcaaacccggatatggtcggtcatacaggaatcttagaagctgccatcaaagcagttgagacggtagatacctgtgttggaaaagcagtcgatgccatcaaagaagtaaacggacagttattcatctgcgctgaccacggtaatgctgaacagttagttgattatgagacaggagcaccatttactgctcatacaaccaatccggtaccgttcattttagtaaatgctgatccatcttataaattgagagagaacggatgcttagctgatatcattcctacactcattgaattaatgggtatggagcagccggctgagatgactggaaaatctttattggtgaaataacacccagagtttaaaggacgcagtgttgcagattttgtggtgctttctcaggatctgaaggacgctcatacatgcccgatcaacgtcatga

SEQ ID NO: 14365 - DNA, 591 bp, Unknown
  gut microbiota DNA sequence
aacatatcgcagcagtttgtggcggtacttacataggaaatgaagcagataaaaaaagagagattatgggagccgtaatcgacagccgccttgtggaaaaagattatttattcattccggtgcgtggagaaaaggtggacggacacagtttcatcccatctgtttttgaaaaaggagcacttgcggtgctctctgaagagaagttagagagtccggaaggtccatacattcgcgtggagaacaccttagatgcaatgaaaaaaatcgcagcagattaccgaagaggtcttgatatcaaggtggttggaatcacaggaagtgttggaaaaacaagtaccaaagagatgatcgcatccgttttggcacagaaatataatgtgttaaaaacagagggaaacctgaataacgagatcggacttccgctcacgatttttaaaatccgggaggaacatcaggtggcagtgcttgaaatgggaatttcagagtttggcgaaatggatcggctggcaactatggcatatccggatatctgcgtgatcaccaatattgggctttgtcatctggaaaatctgatcacaagagacggtatct

SEQ ID NO: 14366 - DNA, 793 bp, Unknown
  gut microbiota DNA sequence
caaggcggcgttcttcctctaaatcttcggaagaactgtccgaagtgatcgacatataacttgggaacagtccgtcctccattcctgcaaggtaaactttcgggaattccagaccttttgcactatgtaaagtcattaaaacaacataatcactgccctcgtcgagactgtcaatatctgcaaccagagccacttcctctaaaaagccactgagcgtcggatgttcctctccttcctcgtaagctaccactttactgatcaactcatcaatattttcaatacgggcctttgcttcctcggtatcctctgcctccaattccttcacatatccggtttcatcgatgatctcctgcaaaagttcagaaacgcttatgatttctgccttactacgcatcacctgaataaaattcacaaatggcttgatctttgctgcactcttaccaagtgttggaatatcgtctgccatttttagtgcattataaaaactgatatctgccgtcgccgcataatctgccacacggtttaaggttgtcgctccgattccacgttttggcacattgataattctgcggactgcaagatcatctcgcgcattatcaatggtttttaaataggcaagcagatccttgatctcttttctcgcatagaagttcacaccgccgacaatcttatatggaatattggatacaataaatttttcctcgaaaagacgtgactgggcattggtacggtaaagcacagcgcagtctccataatggtatcttccctcattcacacaggcattgatatcctt

SEQ ID NO: 14367 - DNA, 2745 bp, Unknown
  gut microbiota DNA sequence
gcacagatatgacgtgtgagctgttgcactacatccgctcgtggaaagtacgtgcgatcacttcatcctgctgttcttttgtcagtttgataaagttgactgcatatccagatacacggatggtaagctgtggatacagttctggatgtttctgtgcatccaataatgtgtcacggtttaaaacgtttacgttcaagtgatgtccgcctttgacaacatagccgtctaacattgcaacaagattgttctcctgtgctgcctcatctttgcccagtgcatccggtacaatggtaaatgtattggaaataccatcctgtgaatccataaatggcagtttagcgacagatgccagggatgcaaccgcaccatgggtatcacgtccatgcatcgggtttgcacccggagcaaatgctacacctttctttcttccatccggtgttgctcctgtatttttaccataggaaacattggatgtaatggtcaaaatcgatgttgtctggataccgccacggtaggtgtggtttccttttacatatccgataaaggtgtggagcacctgttttgcgatctcgtcaacacgatcgtcgtcatttccatatttcgggaaatcaccctcaatctcaaagtcaacggtcacaccattctcgtcacggattggttttacttttgcatatttgattgcagaaagggagtctgctactacagaaaatcctgcaataccggttgcaaaccatcttctcacatttttgtcatgtaatgccatctctaatttttcgtagcagtatttatcatgcatgtagtgaatgatatttaatgcgttcacatacactcctgctaaccatttcatcatatctttgtatttatcccatacttcatcgtaatctaagtattcggatgtaatcggacggtatttcggtccgacctgttttcctgtcatctcatcgacaccgccattgatcgcgtaaagcaggcattttgcaaggtttgcccgcgcgccaaagaactgcatttccttaccgattctcatagaagatacacagcatgcaattccataatcatcaccatggacaacacgcataatatcatcattctcatattggatcgcagagtgtttgatggatgtctcggcacagaattttttgaagttttccggcagttttacagaccagagtacggtcatgtttggttccggtgctgctccgatgttgttcaaggtgtttaagtaacggtaagacatttttgtaaccatatgtcttccatccacgccgattccaccgatggactctgtcacccaggtaggatcgccggcaaaaatcgtgttgtactccggtgtacgcgcaaattttacaagacggagtttcatcacaaactggtcgatgatctcctggatctctttttcggtaaatgttccctctgcaagatcacgctctgcataaatatccaaaaatgtagaggtacgtcctaaggacattgccgcaccattctgctctttgactgctgcaaggtatgcaaagtaaacagcctgtgttgcctctaatacattatttgcaggttttgaaatatcacaaccgtaaatttctgccagtttctttaacatttccagtgcacgaatctgctcggataattcttctctctcacggatcacatctgagtacatgatggtgcgtgtattgttcaactgctcttttttgtcctcgatcagacgatccacaccgtaaagtgccggtcttctgtagtcaccaatgatacgtccgcgtccgtatgcatctggaagtccagtgatgatatgtgcgcttctgcacgctctcatttccggtgtgtaagcatcaaatacaccggcattatgagtttttctgtgtgttgtaaagtactctaccacttcaggatcgactttgtatccattgtcctcgcacgccttgattgccatacggataccgccgtaaggctgcagggcacgtttgaaaggcttgtccgtctgaaaaccgacaatcttctctttctctttatctaaataacccggaccatgggaagtgatcgtggaaatgatctttgtgtccatatccagcactccgccggcttctctctcctgtctggaaagttctaatacctgatcccagagatcggtggtatcctgtgttggtccctctaagaaggaatcatccccatcatatggatgataattcttctgaataaaatctcttacatttacttctgtttcccaggctccgccctggaagcttctccattctgtctgcatttttctctccttctgccaccgtgtggccttgcatggttcatcacacttttttatgatgctcattctgatttttgatcgatgcatggctagttttttctaaccacggttagtctatcctaactttcatcttttgtcaagagtcacgtgcgctttttccggtaagtattcgaaaaaatacaatgagtggttcctttctcatgctgatgggattttttggaaaatttaccctaaaaataaaaagaaccgcacgtctggactcttcgcccagacggtcggcattcttttgttatacttcacgtggtaaaccccactatttccgtcagtcatataacaattgcattgtactatgagtggcaaatattttcaataggtaatttttcacaaacaatccacatatgccagcaattcctccggtctgcactttagcacccgtgatagcttcagcaatgtcattccctgtgtcttattaatatcccgttctccctgct

SEQ ID NO: 14368 - DNA, 1660 bp, Unknown
  gut microbiota DNA sequence
caccggattatccattacagaagaaaaaacacagctttgagtatttaagaactatttcacatttaagaccgagaaccaatacattcgaggcagtattccgtgtacgttccctctgcgcttatgcaatccataagtttttccaggaaagagatttcgtgtatgtgcacacaccactgatcacaggaagtgactgtgagggtgctggtgagatgttccaggtaactacacttgacatgaacaaccttccaatgacagaagacggaaaagtagattacagcaaagatttcttcaataaaccaaccaatcttaccgtaagcggacagttaaacggtgagacttatgcgatggcatttaagaatatctacacattcggaccaactttccgtgcagagaactccaacacaacaagacatgccgcagagttctggatgatcgagcctgagatcgcatttgcagatttagaggatgacatgatcttagctgagagcatgttaaaatatgtcatcaactatgtgttagagaatgcgccggaagagatggcattcttcaataactttatcgataaaggactgttagagagattacagcatgttgcaaactctgatttcgcgcgtgtaacttacacagaagcggttgaaatcttagagaagaacaacgacaaatttgattacaaagtatcctggggctgcgatcttcagaccgagcatgagcgttatctgaccgagcaggtgttcaaacgcccagtattcgtaacagactatccgaaggagatcaaggcattctacatgaaactgaatccggacggaaaaacagttgcagcagttgactgtctcgtacctggtatcggtgagatcatcggaggaagccagagagaggacgactacgaaaaattacttgcaaggatcaatgagcttggcttaaaagaggaagattacagcttctaccttgaccttcgtaaatacggttctgcaagacatgcaggattcggacttggatttgaacgctgcgtaatgtacctgacaggtatgtccaatatccgtgacgtgatcccattcccaagaactgtcaacaactgcgaattataaaattgagtttcatatcgtaggtgattgcgaaactcatgaaaatctaaattgaattgtgaaaaattaacaaaagcttgagaaaacactggggagcggtcggtacttagaaggcaggaacgatgttaatcgtgactggcttcttagtaccgttaccagcgacacgtagcgagagcgtgttttcgaaaattttgttaattttgaacaattaaaagaagagtaggatgagtttcgcaattgcctgctacgatatttagatgacaaggagatggattgtatgagatatgttttggaaaatgacacattgcgcgcggaaatcgattcttatggggcagaactaaaatccgtaaagagaaaatccgacgataaagagtacatgtggtatgcggacaaaaaatattggggaagaacctcccctgtgttgtttccgtttgtggggaactgcagaaataaagagtaccgctatggcggaaaaacgtatgcaatagggcagcacggctttgcaagggatatggaacataccatggaatcccagacagaggataccatctggttttctttacattccgacgaagaaa

SEQ ID NO: 14369 - DNA, 828 bp, Unknown
  gut microbiota DNA sequence
atacaaagaccttatatttttccatcggcgcacatccggctttcttatgtccgtttcatgacgaagaaagtaagcttggatatggtctgcaatttgcaggattaaaagaactgcatcatcatggcaacacagaggataccggacttgcactgatgaatgaggatctggtgattccgctggaggatgagaaagtatactttacaccgggattttttgaccgctgtacttatatggtggaaggaaaacagactggggaagtttcactggtcacaccagatggaaagccttatgtgactatggattttgatgcacctttatttgcaatctggtcaccggaaggaaaagacgcaccgtttgtctgcattgagccatggtatggcagatgcgacgcagaggattttgacgggacactcgaagaacgcgcctatgaaaatgcgttagagccacagcaggtatttgaggcttcttacagcatccattacctgtaaaaactgcgtgccaaaacgacatccgcataaagcgcagatgaaaaattgtgcgaataagccgccggattatttcatatatatagacagaaataaaagtctggcggtggcggattgagagcaggattgaaattaaaggcgagggatgcaaaagaaaacccggcaaaagtgctggcagtggttctttttatcatgtttatcataagtgggttattactgttgcttctggcgttgcttttgtaccggctggaactttcagaggcggttgtcaaagtggcagtgatcattatttatatcgtaacaggtatgtcaggcggcattctcatggggaaaaagataaagg

SEQ ID NO: 14370 - DNA, 2665 bp, Unknown
  gut microbiota DNA sequence
tgtgctttaataaaagaagattcgtttatgccatgttcttattttcttctctttacaatatgctatgacggttgcaattcacggtatgaaatagtacaataaatcgtcttaaaaatggaataataatgttagtatatagcgaaaggaattaagatgtcaaaaatagagtttcacgaaattacattagatgataaaacatggatggatgccagatttcaggaagatgacagaaatgcatgcgagtatacgtttgccaataattttgtttggcggaaagtgtatcatgttgaagtagcagaaaaatatgggtgtgcgatcattcgttttgaggaggaaggagtggtgatgtattcctatccgatcggggcaggtgaccgcagaaaagtgatcgatgaactgcgcacgatctgtgaggaagaaaaacgcccacttattatgagcccattgagcgaagcagaccgggagcagatgcttacatggtatccggaacagtttttgatccagggagaccggaacgattatgattacatttattccagagaaaaattagcaacgcttgcgggaaaaaagatgcatggcaagagaaatcatattgcgagatttcaggatgaggatgactggtgctatgaggaactgaatgattccaatatagaagaatgccgcaatatgacttacacatggatcaaaatgcgggcagagaaatggaatgaagagatggaacttgagatgtcagtgcttcatgaggcatttgactatagaaaagaactcgggcttgtcggtggaatcatccggaaggcagggcagattgttgcattttctatcggggaaccattaaacagtgacacgtatgttgtacacttcgaaaaagcatttccggatatgcagggcgcatatccgatgatcaaccagcagtttgttttacatgcgtgtgaaaattatacttatgtaaaccgtgaggaagatacgggggatccgggactgcgcaaggctaagatgtcctattatccggaaatcctgctgaaaaaatacgtggcggtctcaagtgatgtcatttttgcagataaggaaagaaacagggaagaaatccacaaaatatgggagacctgttttggtgacgaggcggaactggtagatttttatctggacaaacggatgacagaggataatatgctgattatctgtcaggacgggcatgcggtttccatggcaagctttttagatatgaatatcagggatggtgaggagtggaagccagcaaagtatgtatattcagtggcaacgctcccgggataccgtggcagaggttatgcagggaagatattaaagaaggcagaagagatttttaatatgccattggtgctagtcccggcggaaaaagagcttgtcggttattaccgtaaggttgggttcacagaggcgtatccatcggagcgtttactggaaaaacaggatgtgccggaactttttgcaatggaattaaacagttattctgtggaggagatcactgcagcagaatatcaaaaaatccgggaacagaaattgatgagagatggttttattgcatgggatgaagcggcgatccgttttgcgatggattttaactgtttctgtggcggaagaacggtgaaggtagtgtggagtgatgatatttccagagacgagagtgcggaggacgctgatattttaatgtactgcccggaggatggaacgctgcatattatcgaaacgacactgggcaaagaacagtttgaggaacttctgccggagcttatggcgcagacaaaaacaaaacgtctggtatatgacagaaagggtatcatggtgctttcttctgatgaccaagacaggcaggaaagactgcttgcggatggttattttgcgttgtcgctggcgtaaagtccgttttgagattctgaaattttcagaaattatataaaatatataaaaagttttcggtttaaaataaaaatatgttgataatgtataaaaatatgatataataaaaccatgatataaataagcattcagaaagctatctggcatagcatgaaattggatcattatatcaaataagcgacaaaggggttggacatcatgagaattaagatcacaggaagaaacatcgaattgacagaaggactgaaagccgcagtggaggacaagctgaacaagcttgagaagtattttactccagacacagaagtgaatgtaacattgagcgtagagaaggaacgtcagaaagtcgaagttacaattccaatgaaaggaagttttatccgttccgagcaggtaagcagcgatatgtatgtatccattgacttagtagaggaagtcattgaacgtcagcttaagaagtatagaacaaagcttgtaaccaagcagcagaacgcagcagcagttttcaaacaggatttcttagatgagaagtcagaggatgatgaggagatcaagatcatcagaaccaagaaatttgatatgaagccaatgtatccggaagatgcatgtgtccagatggaattattaggacatgatttctatgtattcattaatgcagagacggatgatgtcaatgttgtttacaagagaaaaggcagtacttacggattgatcgaaccagagtactagtagggatttttaagaggagagcgaatagctctcctctttt

SEQ ID NO: 14371 - DNA, 3175 bp, Unknown
  gut microbiota DNA sequence
tatcctttctacaaatcagggaattatcacagacaaagaagcaagaaaactccaggttggtggagaagtattagctttcgtttggtaggaaataatgacttcctggcttatgccaggaggatggactaccattctgatagatatgtaactttttaactacggtgaatcctcaccgcaacgaaaaattaggaggtacgggcatgtcacgtataggaagaatgccaatcgcagttccagctggcgttacagtagaaattgcagaaaataatcatgtgactgtaaaaggtcctaagggaactcttgaaagaacccttccatctgagatggacatcaaattagaaggtgctgaagtaatcgttacaagacctaatgatttgaaaaaaatgaaatccttacacggattaacaagaacactgatccacaacatggtagttggtgttacagacggatataagaaagagcttgaagtgaatggtgttggttacagagcttccaaagctggtaaagttttaactcttaacttaggatattctcatccagttgagatgacagatccggaaggaatcgagtctacagtagacggtaacaagatcattgtatcaggtatcgataaagaaaaagttggccaatacgcagctgaaatcagagataagagaagacctgaaccttacaaaggaaaaggtatcaaatatgctgatgaagttattagacgtaaagttggtaagactggtaagaaataattaaaggagtgacgaagaatggttagtaagaaatcaagaacagcagttcgtgaaaataaacatagaagaatgcgtcatcatcttgcaggtactgcacagagaccacgcttagctgtgttcagaagcaataatcatatgtacgctcaaattattgacgacacagttggaaatacacttgtttctgcatctactcttgacaaagagttaaaagcagaattagagaagactaataacgtagatgcagcatccaaacttggtactgtaattgctaaaaaagcattagataagggtattacaacagttgtctttgatagaggcggttttatatatcagggaaaagttaaagctttagccgatgcagcaagagaagctggattagatttttagtaggaggaaacgaaaacatgaaacgtgaaatcattgatgctagtcagttagaattaaatgataaagtagtatcaatcaaacgtgtaacaaaagttgttaagggcggacgtaacatgcgttttacagctttggttgttgttggcgacggcaatggtcatgttggtgcaggtttaggaaaagcaactgaaattcctgaagctatccgtaagggaaaagaagatgcaatgaaaaaactcatcagcgttaagttagacgaagttgatagtattacacatgatgttcagggtaaattcaccggtgcatccgtattattaaagaaatctccagaaggtactggtatcatcgctggtggtccagcccgtactgtatgtgagttagcaggtattaaaaatatccgtacaaaatctttaggttccaacaacaaacagaacgttgtattcgcaacaatcgacgctctgggtcagttaaaatctcctgaagaagtagcaaaactccgcggaaaatccgttgaagagattctgggttaaggaggaatttgaaatggcagataagaaacttaaagtaacattaatcaaatctacaattggtgctgttccaaagaacaaaaaaacaatcgaggctcttggtttaacaaaactttacaaaacagttgagttaccagacaacgctgcaacagctggagcacttcgcaaagttgcaccatacgtaaaagttgaagaagcataaaaaataagataaggaggtgtcggtgatggatttatccaatttacatggagctgccggttcagctcatagcgataatttcagaagaggacgtggacacggttcaggaaatggtaagaccgcaggtaaaggacataaaggacagaaagctcgttctggtgctcctagaccaggtttcgaaggtggtcagatgccattatacagaagattgccaaagagaggtttcaaatgcagaaactctaagacaatcgttggaattaatctttccgctcttgaagctttcgagaatgacgcagtagtatctgtagagacattaatcgaagctggtatcgttaagaacccaagagatggagtaaaaattcttggaaatggagaacttactaagaagcttacagttcaggcaaacgcattcagcgcttctgcaaaagagaaaattgaagctcttggtggaaaagcagaggtgatctaatgctagagacactccgtaatgcattcaaaattaaagatattcgcaaaagaattatttttacatttttaatgttagttgtcatcagaataggaagtcagcttcctattcctggtgttgacagtgaagtatttgcaaactggtttgctagtcagaccgctgatggaatgggcttttttgatgccgttactggtggatcattcttgaatttatctatattcgcattgaatatcacaccatacattacatcatccatcattatgcagcttcttactattgctattcctaagttggaagaaatgcagcgtgacggagaagatggtcgtaaaaagatcgccgagatcacaagatacctcacagttgctttagctttgattgaagcaatcgctatggcaattggtttctcaagaggtggatacttagaacagagtgattcgaccgctgtttatgttatgaatatcattatggttatctttactcttacagcaggttctgcagtccttatgtggattggtgagagaatcacagagaagggtgtaggaaatggtatttccatcgtgttgacaatcaacatcatttcccgtatgccaaatgatatcggaacattatatcagcagtttatttctggaaagacagttccaaagggaattcttgctgcagttattatccttgcaatcatcgttgcaatggtagtatttgtagtattacttcaggatggagtaagaaaaattccggttcagtattccaagaaaattcagggaagaaaacaggttggcggtcagtcaacacatattcctctgaaagtcaataccagtggtgttatcccagtcatctttgctcagtctttattacagacacc

SEQ ID NO: 14372 - DNA, 3232 bp, Unknown
  gut microbiota DNA sequence
taatccatagtgagtgcaatttatagtgaacgcagaaaagtttatgaatgttgtccggcggcataccacctttgaagaacttacccctactctgctgcgggagtttgtagagaaaatcgttgtgcatgagtgcagctatgacgagaacaagacccgcagacaggacattgagatttattattcttttgttggcaaggtggactcgcccgaataaccgcccgacctatccgacacaatgcgcaagtaattgacttctatgttcccgacgtaaagcttgccattcaggtattgcctctatgtaagaaattttctccttctttttatcatctgcactttgtgtgtctttttctgaaatcgtatccacgtggaaatactccttccaatctatgcaaccctatgatacagcacgttctgtttcatcagtcggccatgattttctaagggctgcataagaaatcaaaaagtttgcaagccagcctgcaggtacagcaagccagacaaatgcaataccaaaacgtggtgcaaaaatcagtgcgaccgataaacgaatcgcaagatttaccatgttcgcaataaggaatggacgcataattccaagaccacgaagcaccccatctgttgccatcttgatacccataaagataaagaaataaccaagccatctcatataatcaccagacacctgatatgccagggctgttccgtctttgcctaggaataatgatgagatctgagtatgcagtgtttcaataactatgaaagcgagagctgcaaagcatgtatctaataacaatgccgcacgatagccttttttgatacgtgaggttttatttgcgccaagattctgggaaacatatggtgaaactgcattaccaatagatacaaacatcaatgaaaaaacattctctactctcatcgttgctgcgtaacctgcaagtgcctgtgtaccaaaaggatttacaactgcctgtacgatcatcatgcctattgatactgtagactgttgaagaactgatggaatggcaattcgaagcattaattgtaactcctgtctgtcaaaccatctataccggcacttataccgacgcatccggtaaagaaaaatcaaaaacgaaaacactgcggaaacaccctgtgcgatgagcgttgcaagagctgcaccgaacacacccagtctaagatccgctaccatccaaagatccataaaaatattcaatacagatgaaaatatcagaagtcctaacggaatttttgattcgccgattgatgtaaacatggtagatagaatgttatacataaaaagaaacggaaatcccacaaaatagacttgcagatacaatactgcttcgtccagtatatcagcaggtgtctgtaacaagctcatcatcaggcgggaaaacccaaatccaaacgcacccaggagtatgcttaaaatacaaaagctgatcagtgatgttgacacaatcgttttcattttactgtaatttctggcaccaaaatagcggctcacaagcactcccgcacctacaccggcaccaagtgctacacatatgaaaacattcgtaagtgccgcacaggcaccgactgctgccagtgcagaagaaccgacaaactgaccgacgataatcgaatcagccatattatagacttgctgaaaaaagctgccaagaatcattggcattgcgaaaatagtcaacgctttaagaggtttatctgttatcaaatattcatcttttgacattcttttactgctccttctaaaaaaaatcccattgcgagattgtatgcttcatcatacatcatataaaatcagaaaacaaaaaacggctgccagccttgattttactagctatacaaccgtttttcgttttccaactgtcaaagatgggaatatagcatggtttcaggaaagttgcaagggggacttcttccatactactgtgatgtaatacctgattaatttaggggaatcattctatttgttagaattctcttgttccaacaaatacttcatatattttttggtatctatatccctttttcatttttgttgagtcaggaataattacatttaaatcaactaactgattaataatttttgaaacaacatttggagatacaccagataactcttgaatctcttttttagtaaaaacaatctgtttcatgataaccggcattatcttataaacagaattaccttttattgcttcaatagttttcatgtcttctttatatatttctttgattctatccaacttgtaaatatatgcattacactggtcaataatacattgtaagaagaacttaatatatccggatacatttcctcgtctgcattccatcagatttctctgatatgacggtttatataactcaagtatctctgacatatacaaaataggtgtgctttgatccaacatcgccatttgtaccggtatcaaggctctgccaagacgtccgtttccatctttatacgcatgaatagtttcaaactgcatatgtgataaggcaatatttaccaacaacggatcatcaaattcatcattcatgtattcatatagatttttgagcaatccatatacctcttcaggaattggcggaacaaatgttgcggtatcaatggtacatccccttggttcgatccaattttgtgtagttcttatttgacctggagttcgctgtgatccacggacactatccagtatgatcctatgcatttcattgacaagctcatagctgatcttatttcccacctgtaaatttgaagatgcatattctattgtctttttaagattttgaatttctctgctatcatccgttatttccatgtacttcaggtagtacatctcatcttgtgaaatctgggtaccctcgatctgtgttgatttataactttcattcaaaataacagaatccaggaagaaacctgcatcaaattccaaagtgtttaaaagagacttatattccccatacttcacatttgcttctgatatcaacatcagcatttctttatcaattttgtattctaaaggcattttttttgctttatatggctccatatccacacactcctttcatctacagtgaaataatactacttttccaaaagaaaatcactgttttttttaaattcagcgtttttttactttattcaccgtcgatgaacatatgccctcttattgttacacaaaaaagtttttcttatttcgcctgaatttttttattttct

SEQ ID NO: 14373 - DNA, 1234 bp, Unknown
  gut microbiota DNA sequence
attacaaaaaattattaagccagttttacaggaccgtcaccgatctcaactacatagaaatcagcagcataaccgatcttatctttataagccacacctactttttcgataaaggaatcgactgcctcatcttttacaatgctgacggtacatccgccgaatcctgcacctgtcatgcgggaaccgatcactccgtctactttccatgcttcttccaccaatgtgtcaagctcgataccggttacttcgtaatcatcacgaagggaaacatgggaggcgttcatcaactcgccaaacagagtaacatcattattcttcaatgcctccactgccttgatggttctctggttctcatatacagcatgttttgcgcgttttactctgacagggtctttaatcgcatccttgtactgctcgaactgctcctctgtgagatctccaagtgaatcaatttttaccactttctgaagttctgccaatgcagtctcgcactcacttcttctctcgttgtatttggaatctccaagcccacgttttttgttgctgcaggagatcacgatctttgcattttccagcttgatcggtgcatactcatattttaaagttgccgtgtcaaggaaaatcgcatgacctgcttttcccatagcgattgcgaactgatccatgataccacagtttacaccgttgaatttattttcagagaactgaccgatcagcgcaagatcctgatttgtcacgtcaaatccaaacatatcttttaaaatatatccggtcaggacttctacagatgcagaagaagaaagtccggaaccatttggaatgttaccaaataaaacaagatccataccctgttctactttcatgcctttctcaccaaacgcccacataactccctttggatagttcgtccagtcagcttctttctccggttttaatccttccacagaagattcaatcacaccaagctgctcaaaattcatggaatagaaacgaagttttttgtcatttctttttcttgccacaccataagtaccaatcgtgagtgcacatgggaacacatgtcctccattgtaatcggtgtgctcaccgatcatattcacacgtcccggtgcaaaataaacaccgatttctccctcatccccaaataattctttaaatttagctaatacgtcttcccagatcatataatcctccttattttgtgaagcaaaatccaaactcttatgatgtcttg

SEQ ID NO: 14374 - DNA, 3647 bp, Unknown
  gut microbiota DNA sequence
tgcgcacctgccgtttcctgttactatcacattatcatgttcgtttttacattgcaaccaattgactgcagactgcaacaataaaaaagaaagatgcaacatttttacatgttacatctttcttgaaattagttttcttctaacataaccttacattccttgactctgcaggcaattccatatttcagaattttctttatcccctgctgttcaaaatattctgtatatcgcttatctatcatctgttttagtgcatccctgcaaacagcttcaagatcatgatgttccgtatttccctgtttggcactgcaagtctgtatctttttgtatcaactctgcctttatgtgtaagatatcccgtcatgaaaagtgtactccagaggttatccatggatgcatacagttcattataagtcagatcctcacgtatatctttttctacgatttcaccatttacaagtctctctaagtctgtttttgccagcccctttgctgctcctgcactttctataaaatgtttcagcacatcgtttccactggtgttagtccaataattctccggtggaagcatcggattccttctatgtgcatcgcaataattaatgacatcccacggacaataaacatctgcatttccgaagcgatatccgtcataccactcttttaccgtctcataatgtgtatcctgcccgtaataatgaagcattcaatgtcttaccaaaccgacgtggacgcgtgaacagattgacctctccccagttatttaaaagctgctcgatcagaccggttttatccacatagtaaaagccatctctgcagattttttcaaaattttcaattccaacaggtaattttataaattctgccatagctgtctctccatttattacagttccttttccaataatacatattcatatcgatcctgaattaattcacttgcgtaactctgcgtaatttttccatcccttaccagtgcacctatacttggaacctgttttttctttagttccatcgtaataatattagacatcgcatttcccaatcctacatgctttctgtctacccccacataaagcatcacatattcatctggtttgtgctttatttgaaggattttaaaaaagtttctgacatttaatttataaggcaaatttttgtaattaggaacacttataaaaaatccaacaattttttctttataaaaagcaattttaaccatatcaaaatctaatatatatttataagagctaaaaagtttcataaaatcgtctttttcaatatacttaaaagctggaaaatcactatataaatccatgattagttcatataccttttccatgatagattgataattcttcttgtcaggactttttatttcatatccgttgtccctaaattgttcataacgcttctgaaatttctgattatgataacctgcatctataactggataaatattggatgtataatgattttggactataaaaccataattagtgagtaattgataataataatctttattataaggttctcccgtataaggaattttgtcaaacaaattcatttttaatctgtattttatccaaaaagaggcatcgacaggtcccgcaagtttcacttttccatcttttttagccttttctgaaatagtatctaacaataaatctacgattttctgatcatctatactttcaaaaaatccaaaatatgcaacatcatcctctggataataagtcaacatacatcgtgcaacaggtatttgtgcatttttatcaatgactacaaaaggcgtacacttaaaatatttgcttaatatatgattttcagataataatttatattctgtatcataatcctgtgtcagctcattcttttgatataatttacatggtaatgctaaaaaatcagtatatacagattgattttttccataaatcacttcataattcatacaattttccatttattatgctccatctattcttcttacaattcccttatatgcatctacctgcacataatctccattttttaacagacttgttgcattcttaacattcacaatggaaggtttcttcagttcccttgtaataatggctgtgtggcttaaaatagagcctctctccacaataatcccttttgcatcctttatcagaaatacccatcccggatccgttgattccgcaactatgattttatttttgacgtctatattggaatctgcatcttttacaacaaccacttccccttccacaatccccaatgaagatcctgtgccaaataaattatcatgattgttcagcatatttatattttcaaaatgtttttcaattatttgatctgcatagacgagcctgctatatgctggaatggtttcatttttcttatattgaatttttcgcttgtttaccaattcagtataacaatctttttcgttgatttcctccagaaacagatagaaaatatcttctcttttttctatcctttcttccttaaccaaaatttctcctattttcaggaaaatacttcttgccaacccaaaaatccgtgtcctgtttaaccttgatatttctctgttataaatgccaagtttggctttctttaattttctatttactttaatatctgtacttgattgatccagacatgtctcatcatgagtttgaatatattctaataataaatccggattcactctataggtctgcgtttccagttttagttcacccagacacctgtcaccatataattcgatatatttctgaaataactgatggaaccggttcgatttcttttcctctttataaacacgaatcaacgtatttagagcgactaccggtttcatgctttccagattcttaatatcatttaatttttctttctctttttttgacaaaagccccgtatatataaaagtatacatgtcattgatcaacgtaatataccagtcgctggaaatagctttttctattgctctgtatgtagccaacaaatccgtaatcgaattttgagctttaacctgctctttgaagatcataaaatcattttcaaattttctattcagttttttcatagacttaggggttgattgtaaataatacaaaaaagaaatcacaatctttattttcgttaaaagtgtaactggcatcttttcatcatttacatatttgttctccactccaagcatttcctgccagattttgattaacttttccgaacatggtaatagcttgataatcagataccaattattaatattgtaataaattcttccatttgtgcatgccagcatgttatctaaatgatctgacatactgtttactaaatttttatctttttgagataaatgataaatacagtgtttaaagacatccgcatatacctgctttgcaaaactctgtgtcagcggcagtgaaattcccggataactttcaacaatattgctattatctaatataattgttttgctgtattttaaagtggtaattggtcttgcctgcaaaatataaatattgtcatctttgactgcatattcaatatccatatctttctgaaaaatctctttgattttaacagcagcttttattaaatcatttaaaatagtttgatttaatatcgtttcattctcgaaataataattt

SEQ ID NO: 14375 - DNA, 3710 bp, Unknown
  gut microbiota DNA sequence
tatattacatcccagtccttctccggctacaataaccatctcatttaaaattcccgttggatttgcagtaaaaataacacctgaataatcagattgtatcatttcctgcacaattactttcgatgctgtgtttgtaatattcagttttttataactctcttttactttgtcaacataagaaaaaacattctttctttcaacatttaaaaaagtttcaaattgtcctgcaaagctgctctcatcatcatcttccacctcaaaagatgaacgaattgcaaataattcctctttggaaaaactcaaatctaattcttctttccgatcaacaacaataaagttaggaacatttatgtgatgttctctcagaatttccagatttttgtgcttcatttattttctccaagcttatctatgcgtaaaaaggtagaagataatcgttaaaatcatcaacgattcctgaatataagtataagtttctactttcgttacaattttatatctcgtcggatcctttttaaattcgataaatttccagctacaccataaaacatttattaataaagcaatcacagaccatttacttaaattccaaactaaagcaaaattcgtaaaaatatccatccacgtaacaataaatacaaagttaattgcttttttgtaaccaaacagtttgctgtatgtcacatattccgtttcatcttcaggagcttttatttttcttgaaacttcccagatcaaagcaggaaaatacaacgtcagtaatgctaatacatttgtaaggttcaaaaatggtaagttatattttgtaattgtaaatgaaacgatataaagattaataaatatctgaactggattatgcgtaactaatgccagcggtaatgatttggcaattttgtgtttttggaaaaaccatacagccattaatgaaccataggtatacaataaaacacagaacaaaaaattattcataaaaataaaatttaaaataagcgtaatagctattaaaatagttataaatatgcctaagtctcttttggtaactctccccgaaggcagtggccgttctttaaaaagcctgcaatcaagttcataatccttaaaatcatctgcaatcctaagccagaacagaaaactaaatacagtaaatccgcaaacaatttccggtattcccagctttatatctgttattccatgatttaacagaataataaaataaatttcaccaaacactaaatatcctaataataatcttggaataattggatacatttctttttgataaatatttaacctttttaatgcagctatcattagtctctattcctttctttgtcctattttatcaccaataaaaacctgagtttcatatcctgcctgagattgtctcaatatatcttcatcaatcatgatattgggtggaaaaaacattacaatagtagaacctccatattcaaaataacctttttcctccaaacggctaaacacttgcatattataattctttattcttcccacaagcaacgcacctatttcgacctgcgtaataatgccaaaagattttgaatccataacattcacaactctgctgtttctggcatacactttgtattgatcagaaatagatcttacggtgtgcaattcgcctctgatatattcagatgaaactaattcaccatcatcaaaaaatacataccgatgatagtcgttaacagctaatcggaacacaaatgcatatccatttttatataaatctgcgatttcctttttctgaataatatcgtttaattcataaatagaatttttgatcttcaacttcaatgtttcatctattttataaacagataatttactatctgcaatcgccatcagttcatttggctgagttgtcgttttataagttttttttctgataaaaaaatcattaaaactctcaaaggaatccatattataatctgacatatcaacatgatattctttcacaaaaggcaatatatcttttttcgatttaggactcctctgatattttgccctgagattactaaaccaaggtctggcaatcactagctttaataagattcttccgataaccgtttgatataaaaaaactaagattccctctttatattccttttcttctaccagctttttactgtctctattataaattttagccataattaccattaaatgaaaagtaagacaaatgtaacaatcgcaacaattgaaaaaaatacataccattttcctgatggttttttatttttccaatttgcaacaaataaaaatgccataataccataaataactgcaaatatataacctgcattgcgcagcaggaatggaatcctttgaattatcacataaaaaactggaataacaaatgaaatataggtaactggcacaccttgataataagttgttttacattcattatttgctaatatgttaaaccacgccagtctggttattccacacaaaacatataaaacaatcataactatagatacaataaatataatctcagaacgatattgcgttgacattctatataaaataattgatggaaatatgacaaatgaaataatatcacataacgtatcaatctggattccaaaagccttttgtatctcattccttttacattttcttgcgataaaaccatcaaataaatcgcacaagccagaaatgatcagacagaacattacaaacttcattcgttctattaactcattttcctgaaactccactaatgtaaaaatgcctgtaagtgcaaaaacaacacctatatatgttaaaataactgatttattgaaacatccaatgaataacttcttttcctgtttcatacatttctcctgactttgatcttatataaaaataagtttaccatgatatgcgtaaatccaccaataaaaatatacacaaaatattgtttccacgatattttggcaaatatcactaagatcagcattactccaataagggaatcaatctgatctatcacaaaaaacagctttccaattatatttgtatttgttttaccacatgcaatatctaatcttctttttacaaatgaatttggcaactcaaacagcatatatgtaaaaccaaatagaaatcccatcaaaacattaaaaataaatttattttcataaaaattataaatttgattatgactattgatatgaaaaacattacatatgaatccgattaatacctgcgatatcatacaacagacaatcatggatccaaaacctatccatgttttgttatcgccaaatactctttttccgtcttttaattttctatttcggtcaatcgggtatctatgctttttataaaaatctgtttttataaaaagcatatttaatacaccacccaatataacagataacatcgttaaatacatatctaaaactatcatatatttttcattaaaatccaacatttctccgattgatttcctgctgaatcgttcttctcctgtttatattaatttagtgataaaaactattccctctacaataaaaaaagcaaatccctgcattaacacaataccggaaccaatatcttttgctaatcgaatctcctcattgtattcacctgatatagcatttgcaacatgttcaatagctgtattcgctaattcagccatcaaaacaccactcgttacaatcacatataaagcataatctagttttgttgatttt

SEQ ID NO: 14376 - DNA, 15221 bp, Unknown
  gut microbiota DNA sequence
ctgttttaaaagcatacttcatcccttttatagcacatttaatactgtctaaaaaagtttcgtttttcatatttatccagtgcctttctaatcagatttccgaaaatttttcatatttcaaaaatgcagttccatgatagatacgtttccaaagcaatgactatatatctatcacagaactgccttctgattaaaacatctattctttattccacatcaaccttcaccttcggtaaatgccagatatcatccacatattcctgaatcgttctgtcggatgagaacttgccggaatgtgcagtgtttaagatagcgctctttgcccaggcgctcttgttcttgtaatactccatgatcttcttctgcgcttctgcataagaacggaagtctgcaagaatgaagtacgtatccgcatactgtgtgctgtgcgtattcagcagtgaattgtacaggtcacggaaaagttcggagtcgttcggtgagtagaatccgttcactaactgtgtcagaactttgcggatatcctgatccgtgttgaaaatctgcatcggatcataatcacggttatgctcatgtgcgatcacttcgtccgagctcataccgaaaataaacatattatccggtccgacttcctcgtacatctcaacattcgcaccgtccatcgttccaagtgtcagggcaccgtttaacatgaacttcatattaccggtaccggatgcctctttacttgcagttgagatctgctcgctgacatctgctgctgcaaagatccactctgcattggaaactttgtagtcctcgataaataccactttgatcttgttattgatactcttatcattgttgatcacttctgcaacgctgttgatcagtttaatggtaagttttgcatttttataaccggctgctgcctttgcaccaaaaatgaatgttcttggaacaaattccatatccggatgctctttgatctcgttatagagatacataacatgaaggatattcaacagctgacgtttgtactcatgaagacgtttcacctgcacatcaaagatggaatccggatctacatcaattccattgtgctctttgatatattttgcaaggcgcactttattctggtgcttgattttcagaaactcctgctgtgcttttttatcatctgcataaggcgcaagtttcctgatctgggaaaggtctgtgatccagccttctcccacatgcgctgttacccagtcagccagaagctggttcgcatgtgctaagaaacgtctctgtgtgataccattagttttgttattgaacttctgcggcatcatctcatagaaatcttttaactgctcttttttcaaaatctcagtgtgcagtctggcaacaccgttgacagaataacctgcaacgatcgcaagatgcgccatttttacctgaccatcatataaaattgccatttttgcaattttatcattgttgcccggatactgctcctggatctgtaaaacaaaacggcggttgatctcttccacgatctgatatacacgcggaagcagtctttggaaaatctcgatcggccatttttcaagagcctcagccataatggtatggttggtataagcaacacagtgggttgtgatatcccacgcatcctcccagcttaagccttcctcatccagcaaaatacgcattaactctgccactgcaaccgtcggatgtgtatcattcatctggaatactgctttctcaggcagctgatggatatcctcatgatgctttttaaatctggcgattgcacgctgtaaacttgcagatacgaagaaatactgctgttttaaacgaagttcttttccctgaatatgattgtcattcggataaaggacttccaccaggttacgtgcaaggttttcctgctctaccgctttgttataatctcctttatcaaaggaatctaactggaaaccttccttaggctctgcatcccagatcatcagcgtatttaccatatgattatcatatcctacgatcggcatatcgtatgggatcgccataacggactgatagccttcatggataaatctggtgttgccatttcccatgtcttcggtacggacatagccgccgaatttgatctcgtaggaatactccggtctgcgaagttcgaatgggtagccattctttaaccagttatccggtacctctacctgaaaaccatccgaaatctgctgtttgaacataccataacggtaacggataccgcagccgtaagctgcgtatccaagtgttgccagtgattccataaaacatgctgcaagacgtccaagaccaccgtttccgagtgccggatccggctcctgatcttcgatcacgtcaagattcagtccgatttcttccaaagcttctttcacttctttgtaagcttttaaattgatcaggttatttccaagcgcacggcccatcagaaattccattgacatataatagacaatctttggatcctgatcgtcaaatgcctgctgggttgccagccagtcatcgatcacaacgtcttttacgacataggatactgcctggaaaatctcctgctggcttgcttcttttaactgtttgcgatacatatgacggactgtctctgttacatcattgataaattttttcttattgaagactgctgctgttttagacatttccttactctcctttttttacacctaaaagaacggtttccccattaatattccattctttctcgtatccatccacactgccagctgcaacatcaagtccgagtacatctgctttgattgcatcaccatatttgtcaaagatggcagccactttgtcatctgcctgataagagatcatgatcttatccatcacttcgaatcctgcttcttttctcatggtctggatcttgctgatgatctcacgcacaaatccttcttcaattaactctggtgttaagttggtatcaaggacaacggttactgtattgtccccctccgttacataaccttccatctgtgtcattgtaattaacagatcttcctctgctaattttacatcatcactgacagacttcaaagtgataaatccattttcctttaactctgccatggcagcgtttccgtcaagctctgctaaagctttctggatctgtcctaaatattttccatattttggtcctacagtacggagctgtggtttgaacgtatagcttgtgtaggaacttacatcatcggtaaaggaaactttctttacattcagctcatcctcgatgatctctttgaagtactctgaaagttcaaatggagctttgacaaacatatttccgatcggctgacggttcttgatgtttgctgcattacggcacgcacggcccataaccacgatctttaatacctcatccatatttttctctaactctttgtcaatgtatgcttcattaacggttgggaagtcacataaatgaatactttccggcgcatttttatcaatgctgcacacaagattctgataaatttcctctgtcatgaacgggatcattggtgctgcacatttacagatctctactaacgctgtgtaaagtgtcatgtaggcattgatcttatcctgctccattccttttgcccagaaacgttcacgggagcgtcttacgtaccagttactcatatcgtccacaaactcatcgagtgctcttgcagcttccgggatcttgtaactgccaaggttatcatccacagcgccgatcacggtatttaatttggacagtaaccatttatccatcacggataatttatcatattccagtttatattttgttgcgtcaaatccgtcaatgtttgcatacagtacaaagaatgcataagtgttccataaggtgcttaagaacttacgctgtccctcctgcactgcttttccatggaaacggtttggaagccatggagcgctgttgatgtagaaataccagcggatcgcatctgctccgtaagtctctaatgcatcgaacggatcgactgcattccctttggatttggacattttctgtccgttctcatcctgtacatgtcctaaaacgataacgttttcataaggagctttattaaacagtaaggtggactctgccatcagggaatagaaccatcctcgtgtctggtctaccgcctcggaaatgaactgagccgggaactgctgtttgaacaaatcctgattttcaaatggataatggtgctgtgcaaacggcattgctcctgagtcgaaccagcagtcgatcacttccggcactctgtgcatggtcttgccacagtcagggcatttgaaggtcacagcgtcgatatacggtctgtgtaattccactttggcatcatccgggtttccgcttctctctgctaattcggcgcggcttccgatagactcctgatgtccgcagccttcacattcccatacatttaaaggagttccccagtaacggttacgggagattccccagtcctggatgttctcaagccagtcaccgaaacgtcctttaccgatggattccgggatccagtttacagtattattattacggatcaggtcatctttgactgctgtcatcttgatgaaccatgactctcttgcatagtaaataagcggtgtatcacatctccagcagtgtggatattcgtgttcgaactttggtgcgtcaaataatttgccctgcgcatccagatcttttaatacttcagggtcggctttctttacaaataatccggcataaggtgtctcttctgtcatctcaccttttccgtttacaaactgtacaaacggaagatcgtacttacgtccgacattcgcatcatcttcaccgaatgcaggagcaatatgaacgataccggtaccatctgacattgttacataattgtcacaggtaacaaaatgtccttttttgtgctgttttgctgctacttctgctgcacatgcatataaaggctcatattctttgtactctaaatcttttccggtgtaagtctctaatacttcgtatgctttgacaccttcctcttcatttccaagctttcctaacactttgtcaagaagtgcctctgccatgtagtaagtgtatccgtctgcagcttttactttgcagtaagtctcatttgggttcacacagagtgcaacgttggatggaagtgtccacggagttgtggtccatgcaaggaagtaagcatcctctccgacaactttgaaacgtaccactgcagaacgttcttttacagtcttataaccctgtgcaacttcctgggaagaaagtggtgtaccacaacgaggacagtaaggaacgatcttgaagcctttgtataacaatcctttgtcccagatctgttttaatgcccaccattcggactcaataaagttgtcatcataggtgacatatgggttttccatatctgcccagaaaccaacagttcctgagaaatcttcccacattcccttgtatttccatacagattccttacattttttgatgaaaggttccataccatactcttcgatctgctcttttccgtttaagccgagcatcttctctacctctaactcgaccgggagtccgtgtgtatcccatccggctttacgcggaacatattttcccttcatagtctggtatcttgggatcatatccttgataacacgtgttaatacgtgtccgatatgtggttttccgtttgcagtcggaggtccgtcatagaatgtgtaggtctctccctgtttgcgctgttccattgattttttgaagatgtcatgatcttcccagaacttctctgtctgcttttctctgtcaacgaagttcatatttgtttcaactttgttatacatataatcctcctcaatctaaacaaggctctcatcctgtaaataggacgagagccttaaatgatcgttgtaccacctaattacaatgtacagattttataaaaatcatatacccgttccctgtaacgtaggaaaaacgtcagtgcctactccgtcaaaacatttcggactgcgactgggaagtgatgttcattcctaagatactcgcaccggttcacaccaatcccggctctctttgcctttctcttaacaactactgtcttcgtcattgtcttttctatttgcaatgaatggatcattgcctttaaccttctgtgattatacagagatttccccgaaaagtcaagattttccacctatcttaatgactttcgtttcgtcctgctgatcacatcgataaatctttcgcggatgttctggatcatcagatcttcctcccggtcatttccgtcaaacggcacaaaaccgcctgccatcgtagcatgcccgccaccgcttccgatgccttttaacgccttgcttataatttttccggcatctaatgtgggacgctcactccgcacagaaattttgatcccttctttttttctggaatagaccactgaaaaagagacttccaccaatgcaagcataaaatctgacacactggcgatcagagcctccgggcaatcccttccggtatctgcaaaactgatattctcaaacacctcaatgcttgagatcgccttggaatacgccatcagatcttcaaaatagagtgtgctgttctctaagagataaatcatatcctgatcacacaggtcaaacatgcgccagatcatttccatatccatcttgcatacgcctctcgacaatttctgtgtatccatacggattccaaacgtcagcgctgttgcaattctttgatccatcggtatttcattttcaaaaaaatattgtgctatgattgatgcgcaagccccgacacccggccggatatccgtaaaccggtactccgttttctcataaaccggatgatggtcgatgcagatgatctcatccccggtcatatcgataatattggaattgcccttctgcgcatctaccaggataacctcgtcgtcctccgtgagttcactgtcaatattctcaatatttaccagtctgatgtccaaaatctctctcagcttgtcggtactgtaacggtcgatttttcccttatagcagatcgttgcatggatcccacgaagctttaacagttcctgcaggccgaacgcacttgcgatggcatccggatccgggaaattatgcgtctggatgtaaacatgttctctgttgatctgttttactaattcatctaattttgtcatatgatagcccttatatctgttccccgccatgctttcactgtctttatctacaatgaagcaaaatattcatctactacatgtgtaagttcagcaaatgtatggatttccggtactgctgcattaatttttccaaatccataagcagcatggataaatccgacaccagcctgacagcttgcatcataatctccctgaatatcgccaacatacactgcctcagtcagtccgttccggtctgctaacagtctgatattctcacctttctgtttcagattgtttccataacattcgatatcttcaaaataatgtccgaatccataatgtgataaaaatgcttcgatgtaaccactctggcaattgctcacaatataaagtggatatttctcttttaaagcggacagtgtatcttccaactgcggatacagcacaccgccatgttctctcaaataatcattttccatggaacagcacagacttaataatttcatccgtgcctctttgtctaattccgggaaaagaatatccgcgatcacatccattgtctttcccatgactccctgaatatcctgctctgtcagctctttatccagcaagccctcctgccgtatcgcaagattccaggaagctgccacattagctgcggaatcccagagagttccatccatatcaaaaataattcctcttttcatgttgctcctatctattcattatccacaaaaaaatcaattttagtcaaggttatacacttttgtatatttttctttaaaataacggatcaacgactctgctgaaacttcttttccacagacatttccgatcacttctttcgggctgcgcgtagagccataccagtggatcttctcattgagccattttgtgatctccccgattcttccttctgcaagcagcgtatcaaccgaaccaagttcctcttccatgctgtctaaatacatgccatcgtaaatacttccaagcagataagacggaaaatatccaaaggaaccgtctgaccagtgcatatcctgtaaaattccctccgcatcatctgccggagtgatctgtaaatattcctgcattttctgattccagagtgccgggagttcctccaccttcacatgatcacggaaaatcgccttctccatctcatatcttaaaataatatggaaacagtaagtcagctcatctgcctcggtccggataaaactgtttctcacgtgatttacttctttataaaattcatccagtgaaacttcctgcaactgtggcagtttttcctgcacttttgcataaaccggtacccagaaattccggtttcttccaagaatattctcataaaaccgcgactggctctcatggattcccatataacagcagcttcctgcaactgttccgtcataatccggattcacattctgctcgaaaatcgcatggccgccttcatggattgcagaatacatggcgctgagcggatcatgctcataaaaatggtttgtcacacggacatcttttgatgaaaaattcaatgtaaacggatgtgtggattccccggttgttcctctgttccagtcaaaaccgatataacttaataaaagtttctctacccctttctgtgcattcgtatcaaaagcggcgtgaaacttgctgtcatccggctgttttgctgcaagaaccttctgtaccagtggaatcagctctgttttcagatcctcaaataaccggtcaatcgtagccgaatccattcctttctcatactggtctaacagtgcatcataaacttctttttccgggtctgtgtagccagccatctctgctgtcatgtcgatcattttctgcaaatgtggggcaaaaatagaaaaatctgctttttcctttgcttcctcccacgcattctctgattctgactgtgcctttacgaagctctcataaaatgcttttggaatcctgcggtttctatccatatctgttttcatcttagttacaacaaatttccacttgtcatcaagctgctcgaactcttccggttctgccaacgtatctaacagtccctttaattcgtccgaggtagacatggcaaactgttccgtggaaaaataagtgagcgcatcactgtgtcccgcaaatccttcctttggcgtgttggttctcatatcccaatataataatgtgttcacatgattgaactgttccattttattcaaatatttttgcagactgcttagtgcctcactcatactgatttctccttattccgacaaaatttttcttgttttatcttatcacataacatttatttataacaatgttttctcacaaaataataacagatcacctgcatcacaatggtggcgatccatgacgccggataggaaataaacaaaaaatacagcgatctgtgctgtggaaaaaatgcaaaaatccacaaaatacgcattccgactgttccaatgatcgacaataccatcggcactgcagaataacccataccgcgcagcgcgcccgggaaaagatccataatgccacagaaaaagtatggcactgtggttatggataaaatctccacgccacattggatcacgtccgcttcctctgtataaatctgtaatatttccgctccgaaaaagtaagcaccacaccctaaaaccaatgccacactcaccgataagatcatgcagtcgatcaatactcgatccattctcttatactttccgacaccgaaattctggcttgtaaaactcatacacgcctgcgttacggaattaatggaaacatataaaaatccaagaatattgtttgctgccgtgtatcctgccatcgcagttgagccaaaagaattaactgacgattgtagtaaagcatttgaaaaattaatgaccgtactctgtattccagccggaatccccacctgaaaaatctgcttcagataatatcctttgatagaaagtttcgaaaaagaaagcttatagcttccatccgttctgcaaagacaggtcagcacgagcacgcacgataccatttgtgaaaacaccgttgcaattccaactccggcaacaccaagtccaaacacaatgactaaaatcatattcagtccggcattgatcactcctgcaataatcaaaaaatataacggacgttttgtgtcgccaactgcacggaggatcgctgctccataattgtacagcataaaaaacggcattcccataaaataaatgcgcatatataaagcagacagatcaatcacatctgcaggtgttcccattaactccagagctcctcttgaaaaaaagagtccgacaaacgccataaggattccactgatcagtgccagtgtaatggcggtatgtactgtctcagacatttcttccttccgtcctgctgcaaaaaatctcgctgcaagcacatttgctcccagtgaaattccgataaaaagattggtaaaaacattgatcaacgctgtcgtggaaccgactgctgcaagcgcttcgcttccgctgaaccttcccacgacaataatgtccactgcattgaacatcaactgtaaaatgcccgacaacatcagtggcagcgcaaaggaaatcaatttatccataattgtgccattgcacatatcaatttcatatttactgcttttcaaaaaacctctccttccgttttcataacactttcgatcattcacatcgcattttcctgcgatgatcaggctctttcatcctgaaatttcttctatgataattttcctgttcaaaattccttttttcaattgaagaacataaacatgataatccacggtatccctcgccgtcgtaaacggttcctcacgcagcacctccgcatgaattcctgctttttccaattctgccttccttacgtgtgctttctctaaaagctttctgatcttttcgtcttcctttattccaaatgagcggtttttatagcctgctgtcgccttttttaaccgctcggtaatcaggtccgccactttcgcatgtgcattgcgatgtaataatacggcaatccgctttgcaatcagcggatacggatatttctgataaaaacgcaaccatttccccagctttttatctcccgcctgttccacgatctctgtcatcaaggaaaacgcgccttccgatggcatccacggattatccctcggtacaatgtactgttttgatactgccgggtaacacgtataatttaacggtggaaaataagctaactccacaagctttcgttcctcgtcattacagacttcttccccaagatattcgtatttatcccacaacaccgcgatccgaaattccagctgccttaaattttcataaccttttctccaaaaatgcgcaatatcaccataattgtacaagtttgtttccaattccagtgttttaaaaaggattgttacaacacaatcctcctcttcctggcgcaccacaagcgcataatcatccccatcgcgataaaaagaggcttcaatagccccttcataatctttgtgatatgtacctgtcatcgttgcttccttaaaaacaagaaagctttctatcgtatcattcatctgatagaccagacgaatatcctctttttttctttgcccggcttccgctgctgtctgctccggaagcagcagttcaaattcattctggcttaacagccgctttaacatctcaaatgtatccaatgagagactcctttatcctgtgacaattcttttctcctattatatagaaatccctttcacttgtctagcgtgtacctgagccgcaaagtgccaagctactgtcggaacagtaaggatgcatcataggaatcattcggaatcttgattacaaattcttttgtacatcccgctatctgatgtatttttttctcatctaactgctgtatcagttccatttgaaatccatgcatttcaacaattttttttgcaatagaaagtcctaatccgcttccgcttccgctttttcttgacatatccccttttgcaaatggttcaaataaatgttctgccagctcacccggaatccgttttccgccgtccgccacaagaatataaatgtatccattttcccggtacatgctaatcttaatcttcgtacccgcctcattatgtttcaatgcattgttcagcagattcgtaataacccttgaaaactgaatcggatccacctgtatataaaccggttcttctggaatctcaatttcaaattccatgccggcttcttcaatatccgaataaatcaaagcagcattctcacgcagcagctcacttaaatctgtccttttgagatccaatgtaaatccttcactgtctaatttcacatactcaaataacaaatggatcagatcattcattcttgccgacttattctggattgcctgtaaatattccaattgtttttccggttcttttaccattccatccgctaatgccttcgcatatccatttaccgtagtcatcggcgtcctgaggtcatgcgcgatatctgagagcataagatttcttttccggtcaaattttttctgttcttcttcccgctccttctggatctggcgaaattcttcgatcgttatttttgcaaaataaaatgccccaagcacatatggaagcaaaatggcaagcaatacaacgaatgcaactaaaaatagtagcaccgctttccatctgtttaactcataaatagaaaaattatttttacccgctgacactgcaaacagaaaactcttctgcatatgttccaatgccgcttctaccatctcatgaagcggcgaagggaagattgcattgaatgcccctaataacaatatgatcagaattgcaaaaagaaacagtaaaattcctgattcaaacatcaatgaatttttcttaatatccggaaaaaaataaagcagtatgtttggcagcacaaatctgttgaccacaaaagtcaacagatactccactgcacccactaccgctaaaatttcaataaattttttaattaaaaaccactgtaaattgttttgttctcccatttatttctccaaacgatatcccagcccccggatcgtctgtatgtacgccgccggattttcatcaagttttgcgcgcagcttactgatgcagaccataatattattgtctgccacaatatatgcttcgccccacccatgctcataaatctgctgctttgtaaaaacttttcccggatgctgcatcagaagttccataatgcgatactctacagaggtcagctggatttcttcatctccctttttcaaggtacaggaatcctgattcaataccagatcacggacacagagatttccttcctgtacaactttggttcctaatgaataaaaacgcctgatattcgaatttacccttgccacagcttctaacggattgaatggctttgcaagataatcatctgctccaagattcaatccaaggattttctcggaatctgcatcttttgccgacaaaataatgaccgggatattgctctctttacggatctgctgcaacacatgatagccgtctaatttgggcatcatgatatctaaaatacacaatgccggctgctctgtccgcaataaatccagtgcacgctgtccgtcttccgcttctatgacaatatatttttcattttccagataaagccggagaagatttcttatctccggctcatcatctgcaatcaagattttataatccatcccgtagcaattctcctaattatctgttctgtcttcaaacgcctgattctgattttcaaatacatttgaattttctactggctgctggttcattgctccagactgctcataaaccggctgatttggaatctgctgatacggaacaccataacgcagtgcttcatataaagctgcatgtgtaccatctttatatggctgcacataaaaaattccgaggattcccattgtcattccagataagatatcccagccgataaaggataagtccaaaacaaatgctttccatttctgtccctgcatcattctcttgctttctgcaaaagcttcctctttcgtcatctgtgggttatctgccagtaaatatggaatcatctgatattcataagatttcacaataccaggaatgataaataataatgaccataaaacggtatataaatcacggaaaaacattgttttagcaatatttttgtaattgttatcaaatgcatatccgacatttccaaccaacgctgtttcgtttaagtttctaagataaaaccgcttgcagccgatttccaatggattaaaaatgaatacgtctaaaagtatcgtaatcgtcataataatcaaaaatgcgattgcaaatatcactacaaaaatgatgcctgcaaacaacagtgctgtgtgatccgtatcgtcatagagtccattcatttcatataagaaatcatctacatcgccttcttcataataatcgtcatcgtaatcagaaatgatgtcactgctgcgatctcctatactgtttgacactgcggaactggcacttcctgctccactgccgccaccgataaaaagcgccagcagtaaactgatcaatacacttctccaatagtttcttttaaatgagaactttgctttcttctttaattcttctcttgtccacatatctttttcctcctcacatctgcccttatattattgaatatttgtacacaatttgaaatcttgtgcatcctatttttgaaaggctttttatttgatgatgttatcttatcagcaaaatcttactttccaactcgaataaccttaatataatcttaaatctaaatcaatcttcatttccagattacgacctatctggatttcatcgtatcacattttctgatgccatgcactataattacattaaaaacaaaagaatcctttctgaaatataaaaacagccttaaacctccgatttacaaagatttaagactgttcgtcaatacgtgcgcgagaagattcgaactcccgacaccttggtccgtagccaagtgctctatccagctgagctacgcacacatattctttttcttt

SEQ ID NO: 14377 - DNA, 1608 bp, Unknown
  gut microbiota DNA sequence
ccggtgccggatccggtgtcggagttgttgcttccggtgtaggatttggagtcggcgctggatttgagcccgcattgatttcgccgtatggtgcgttacaaatgctgcaaatggctctgtctttatcggtagctgtaccgccggaacatttttccgtctgcttgtgactgctgttcgatgcgcagatacgggtatgcgttccgtcgccgttggaagtccatgctccccagttatgttcatgattcaatgccggtacaatctcataaccacattctgtgcaaatctgtgcagcatcctctgtggcagccggtcccggtatatgagctataacagtatccgttgcagtacagcccgcagtcttgcatacatgtgcatgaccgtccgcacccttatatccccatgaagaaacatcgaaattatgtgatgcgaaatcaccatattctccaccacaggtcgtacagactgccttgttctgacaggtagctgtaccgccggagcagtctgctgtttccgtgtggctggcatccgaagaacagatacgcgtatgcgttccgtcgccgttggaagtccatgctccccaatcgtgggtgtgtgtcgtccattttatttttttatttgctgcgtcaaagtcagctacaaaatttgcgttatcgcagtagaaaatgttttttgcatcaactgaagatacacttgaatcaacagttgccaaagtctgatcttgcgtagaagtatctttcatataaacataaatttttgcgtcactgtttaatgtatcagtgattttagtcttattactataactaacaagattgttactttcaccagttgtcaacttattttcttcgattaccggtgaaccggaaagttccagcctgcccctgcaatatacaccgccaccattagctttattataattataatagggataggcggtgttgcctgtgatgcttcctcctttcatgcaaaatataccgtctgtgtccacccatactccgccgccaccgtgctccttcatcgttgcatttgtcaccttattgccactaatcgtaccatcgaacatattaaatgtcccatacacatctacaccgccaccgtaataatctgcggtattgccggtaatactgccaccatacatattaaaagtacccagactagaaactgctccaccactgcttgaaactttgtttccactaatctcgccaccatgcatattaaaagtgcctttatcaacctccacgcctgcgccggacatttgatacccgctggcacatttattattacaaatcttaccaccatacatattaaaagtgcctttagaaaccaacacgcctcttccccatgctacatccgaatgagaaatagaactgttgcctttacaatccgtcagagtcagtgtaccgccttcatcaactttaaaaacatttcctgcactcttcatattaatattgtgaccattcaggcaaattgtaacatcaccatttacaatgatactatagcttggttcaaagctatttgctaaataatagtttcccgccggtaactctaaattattgtcagttatttttatagtactttcacctattttcaggtcgttctctgaacctgtca

SEQ ID NO: 14378 - DNA, 878 bp, Unknown
  gut microbiota DNA sequence
acagctactgccacagaccggatggctatgttcatttgccgcctgcacctgcaatgtaccgtgcggtactgtcggaacaagtcctgccaccattccgaataccagtaaaccagaaagtatttttgcaattcctttgcccattctcttttttcttatcatgtgtactctcctgctgtaattacaaaatccaagatcccatgtggcattccatccacaggtctaatatcaaatgcttatcttaagctgctcttttttcttcttacaaacattcctgcaagtcctgcacatgataccatcagaagtgctgtacaaagtgccatgctgaaatcttcgcctgtctttggagattttgcactctggtcagtgttttcggctaccgtaaagtttgttgccgctgttccatctgtccagacaagctcgaaagaatggtttcctgttgacagactcttaaggtattccggtttgaaggtaatgatggtagatccttctgtgaccgtatagttcaccggatcaaccgttactccgtccaccttgacctcacggaattttgaaatctcaccgcttcctctgattgcaaggcttccatctgtattctgcgtccatgaactgcccgctccatctaaaatatcatatgctacctgaaccggtgctgcagctgccgaagctgccggtgctgttgtggttgatgcagccgatgttgatgtcgccggtgccggatccggtgtcggggttgttgcttccggtgtcggatttggagccggtgttgggtttggctctgggtttggctctggggttggctccggtgttggggttggattcggattcggtgttggtgctgcatcttctgtcacagtcaatgtaacgcaatctgaaatgac

SEQ ID NO: 14379 - DNA, 2315 bp, Unknown
  gut microbiota DNA sequence
ctttagctaaagaacagcttcttcacatcctccactggcatattctgaccggtgtaaagcttaaatgcagcaaccccctgccataacaacatgccttttccaccgatacaggtgcatcctgcttcctttgcttcccgcaaaagctttgtctcctccggattgtaaactgcatctgcaactacaagtcccggacggaatgcagacagatctttcacaacactctggtcatccatcggtttcattcctacaattgtagcatttgcaaaaatatcactggactgaatctcttccgtcatttttgctgtatccgcaatatcatatacattgaccacacactccggtactgctttccgaatcttttctgcggtctgtaaagtgcgctcgaaaaatgcatctttgatattgaaaatcgaaatttcacgtgctccgtctaatgcacactgtacctgaatcgcagttgctgcgcccccacctccggctactgtaattttcctgcctttgatctcaattccgtgatctcttaagttatggacaaatccctcgccatctgtaatatatccggtcagttttccgttatcattgacaatcgtattgactgcaccgatgatctgcgccgccggggaaagttcatccatatactttgctgcctctaccttgtccggcatcgtcacattgcacccgcgcatattgaatgttttcatcgctgcgattgcatctttcaccttatcttcttttatatcaaatgccacataggcataatcaagaccaagtttttcaaaactatagttatacattgcaggtgaacctgaatgtccgaccggtgatccgatcaatgccaataaacctgtgtgacctgaaatacgtttttccatgctaatcctctccttgtttcgctttctgtatttatcaaacatgatatacgttttttttcggattggcaagcacttttttcatttaaagcattaaagtttcttttgtaatgtcccagcggaacggactatcctattttattacaacaccctgtcattttctaaaatgaacgggcttgcacattctccggtagtatctacatcatagcacctcatcagatattcctttaactcgtctctgtcttcaaagcggatgagctgatatggcagctcgaatgaaattttttcaaagaaaagaatttcatttcctgtatccagcagcacccctgcatgtccggcgatcagactgttctcattctcgtcaatatgggaatggagataaactgtgatcagggacagcttactgtcatcttcgaatgttacacctgcttttttccaatattctctctgcaccccgatctgcttcttcgtatctgttgatgagtcagtttttatttcagagaaaactgtttcaaacttttctctttcctctgcagtaaaaagctctcctgcatcaagagcagcttcatccaaaaacaagtattctgtattccgctctcctgtatcctgtaccgaaatcagatctttcatcagtccaaatgcggtgatcctgcaattgtatccgataaaatccggattttttttcatccataaatcctgtattgcgtcaatatcatattccggcattgtcatatcaaacgatgcatatccctctttgacaagtgaggtgttttgtatggtatcattgtattctttcacgatcgacatacctttttgtgcatctgtttctactgctcctgcctgaataagctctgtctcaaattgctcccgcacctgttcgtctgccagattgctgtatgccggcaatgacgcttctccaccgcatccggtcattaataaaactgccccaataaaacataaaattagtttttttctctccatttctattcctctttctaagttaaatagctaattgcgaaactcctcatactcttctttcaattatctaaaatcaacaaaattttctatcagataaaaaagaatctcgcctgcgagattctccgcctgcggcgggtcgcatatgcgacatgtttcttatccgccgcagtgcgatcctcgcggagcattttttatgtaatggaaacgaagtttcctattacataaaaaccgggtataccacaacatagtatacccgaatctcgttccgttaaccaccaatctggcagtgtaatgacgtatttttttggatcatttcctgaaatgccttcatctgctcattggaaggcttctctgtatctcccattggatagtctctgttcaatccttcgtattttccctgaccaaagttatgataaggcaatatgtggatctgtctgcccactgtgagctaccctgagtgcattctcc

SEQ ID NO: 14380 - DNA, 1970 bp, Unknown
  gut microbiota DNA sequence
atcgcggcgcagcccgcctgtcacctgatctatgtaccccggcttccacaaaacgaaagctgggttaatatgaaaagcaatcgaatactccctgtttttcatccatatccaagcaaaatccagtcgtcgtacactccacatgtatttctgtttttcccctgtaaaaatgtgatatgcgccgtcacctctaaaaaaagctgccgtagcaatagttcgattgcggattgctcattataacttatgccaattttcctctaaggttccactttttcctgttttgaggataaatccagctcctgtccgcggatatccgcaatacagatatcatttctgcttttcttctttacctgatataacagcatatctgcagtatgtagaaaatcccagctcctgtttccgttctccggaattccatacgaaattccttgggagatcgtcacgatcggcaatgcattggaatataaatgctccagtttgagattcataatattctgccgcagcgcgcctgccttcgcatacacttcctccgcacttatacccgcataaatgataataaattcatctccgccatatctcgcgcagaatgtctgcccatcttccatctttttcagctcatttgcaattgcaataatgcactcgtcgccctgctgatgtccataattgtcattatactgcttgaaaaagtcgatatctaaaatctccattgcaagtggaagtcggtgctcataacagtaatctaatactttgtccgaataatcattcaggcggtaacggtttgccagtccggtcatctgatctgtctccgactgtttcagcagcttcacattgactgcttccatctccctgcggctctcatttgcacgttcgagagaacttctgacataaagcatgttgacgatcatatctttgttctcgcgctccatgatctcggaaagctcataatacagaccagccgcctgcagataacctgcattgtcctgattcttgcggtagcctttgatcttaatggaaatgactctgcgctgcagattgatcacacctgaatctttcacgatctgatccagcttctcaacgatcatccacaacacatcatcccggccgatctccagcatcagcccgcaaaaatcacaaaggtcgtcaaatacctccatgatcggcacatttttattgattatttctacaatctcctggatctgtgcatcgcgtctcacataattatgggtcagatgataatatcttgccttcatgcagtccacatataaaatgtcaatatcctcataataagacgcacattccgcatccagtttttctatataaacatgtgtcttatctaacatcccctgcagcatatagcaacgtgccagattcacgtaactggccatcagtccgacataattttcttttacatccggattacttttgcagtatgaatgagccttttcgaaataactttgtgcctcgtgatacacaccattttccatgtacagattaccaagattctgcatgatgctgatctccatcttagtaatcccatatttgcggcagtaattcaatcctgtcagatagtaatccatcgctgcagacacatttcccttgttgacagaagagattgccatcaggttgtaagaccttgcgatcagctcccactgtccggtctgtcccaacagatggattgcctgcgcaatgttgtggaacatgtgctccacatcattcagcagatagtaagtttccccactgtaaaaatatgcaaaaccaagaagtgccgcatctttatgctcctttgcataccgttctatatcaagacagcatttgagtgtatgctctgcgtcctttcctctgctgttcaaaacttcctgtttccatgcttttaccacgtcatttgattcctgaacttccatgcagtttgttcctttctgccagtttttggtatcttactaacgtttattatagtccagaaatgccctgcgttc

SEQ ID NO: 14381 - DNA, 1926 bp, Unknown
  gut microbiota DNA sequence
atggaataattgcgaaaaaacattgcatatttgcctcaatcgggtataattacagttggtacattccagctttggaatgaatttcaggaaaacggacggaaagaatattctggcagaagttttcagaaaagcagggagaattacatgtcacaatctgtaatgattaaaagcaacaaatatggtattaatctggtgctggacccgaatataccgtttgtggaattattaaaggatgtcattgaaaagttcaaggcgtcagaaaaattctttaaaaatgcagagttagccatttcttttgaaggaaggaagctttcggaagaggaagaaaaccgtattatcgaggcaatcacagagaatacgacgattcagattttatgtatcgtacaaaatggcagtgaacaggaagcagtcatgaaacagcagattgagtactatcaggcagtacagcagcagtttatgaatgcaaacaccggttccggagatttttacagaggaacgttgcgttccggacaggttatcgaaagtgaatccagcgtaaccattatcggggatgtgaatcctggtgcgaagattatctcgcaggggaatattgtcattcttggggcgttgaaaggaaatgcgcatgcgggcagtgcaggtgaccgcaactgctttatttttgccctggatatgaacccgatccagattcagatcggggatctgatcgccaagagcccggataaagaaaaaaccagaaaacatctgttgagacgcgaaaaagttcagaccgcagagtcccagatcgcagtggcgagggacggcaatatttatattgagccggtcacaaaagatattttaaacagaatgtaaaatgcgaaatgcacaggaggaaatcatgagcgaagttattgttatcacatccggaaagggtggagtaggtaagactactacaactgcaaatgtaggaacaggtcttgcacagttaaataaaaaggtagtaatgatcgataccgatatcggtcttcgtaacttagacgttgttatgggattagagaaccgtatcgtttacaatttagtagatgttatcgaaggcaaatgtcgtttgaaacaggctcttatcaaggataaaaagtatccggaattatgtctgctgccatccgcccagacaagagataaagacgcagtgacaccagaacagatggtagagctgatcgaagaactgagaaaagaatttgattatattttacttgactgcccagccggaattgagcagggatttaagaatgccattgcaggtgcagacagagcattagttgtcacaacacctgaggtatctgcaatccgtgatgcggacagaattgtcggtttacttgaagcaaacgagatgaaacgtatcgaccttattgtaaaccgtctgagaatggatatggtaaaacgcggagacatgatgaaagtagaggatgttacagatatccttgcagtaaatctgatcggtgcagtaccggatgatgaacatattgttgtttctacaaaccagggtgaaccattagttggttctgactgccttgctggaaaagcatatgcaaatatcagcagacgtattattggagaagaagttccatttttagacttggaagtaaaacagggtgtatttggaaaattaatggatttgtttaagaaaaactaagggggagaaaccacatgggtttaatggatttattcaaaaagaaaagttctggtgatgttgcaaaggatcgtttgaaacttttacttgtgtctgaccgtgcaaactgctctcctgagatgatggaaatgatcaaacgagacattattcaggtgatttccaagtacatggatattgatgcagacgcgctggatgtaaaaatcactgagacagagtccgattccaacaatggtatggttccggcattgtttgccaatattccg

SEQ ID NO: 14382 - DNA, 1105 bp, Unknown
  gut microbiota DNA sequence
gacaggaaaaatatggttagctataaaataataaaagtgcgaggaatttatgaaaaaaggacaaatcatagaaggcgtgatcgagcgcgtagactttccaaacaagggaattatcagaacagaggatggcagacaggttattgtaaaaaatacgatacagggacagaaagtgtctgcttccatcaataaaatccgcaaaggaaaggcagagggcagacttttagaggtattggaaaagtcaccgctggaaggggacaaaacaggatgtgtccatgccggggaatgtggaggatgtacttaccagacacttccatacgacaggcagcttgagatgaaagcagaacaggtaaaaaaattaatggatgatgtgatcgatcaggaaaaccgggattaccagtttctgggaatcaaggaaagtccaaggcagacaggataccgcaataaaatggaattttcctttggggatgaatttaaggatggaccgttagcacttggaatgcataagcgtggaagcttttatgatattgtgacggtggaaaactgccagatcgtggatgaggatttcagaaagatcctgtctgtcacacttgcttattttcgtgaacaaaatatcacctattaccataaactgcgtcacaccggatatttaagacatctgcttgtccgtaaggcagtcaaaacaggggaaatattagtagatctggtgactacaacgcagacggattttccgggaattgccggagcacagatggatgaagttgaaagtacgttgaacaatgtacaggaaaatgcatttgcaggaacggaagaggaattattagagggctggaaagctgctcttcttgcagcagattacaaaggtatcatgacaggtattctgcatacgagaaatgacaatgtggcagataccgtgacgaatgaaggcacggatgttttatatggacaggatttcttttacgaggaattgttagggcttcgctttaagattacaccattttccttttttcagacaaattccctgggtgcagaggttttatatcagactgccagagaatttataggggatgcacttccaagtggagcagaggcagacattatagagcac

SEQ ID NO: 14383 - DNA, 368 bp, Unknown
  gut microbiota DNA sequence
aaaaaatacaaaataggaatttgtaaatttatgtcaaaaacttgtaaaaaagttattgacaaatgaaaagtggtttgctattattaacgagctgtcgcaagtgagtgataacaaaccacttcaaaacgacagagaacaaaataaaaaagttgttgacaagcacagctggttatgatagtatatcggagttgccaaaaacaacaaagaacattgataactgaacagtgaataaccttgaaagattctaaagcgaataaattcgctcagaagaaatcagagatttcttccgggttttgaaataatcaagttcgcgagtaataattcaagtcatcgaaagatgaacgaacagcttttaataaagcaaacct

SEQ ID NO: 14384 - DNA, 942 bp, Unknown
  gut microbiota DNA sequence
ggcgtcaacaacaccagcaccagaaccaacaccagcaccagcaccaagtgaaccgtcaacaacgcaaggtgaatctacaacaacatcaacaccggcttcgacatcaacggcaagcacacagggcggtcagcaggttataccaaccatcattgaaggtgcaggcagcagctatacgcagggaagtggagatacaatttatttccgttccagtgattcatttgcaaacttccagaaagttatggtagataatgcagaactcagtgcagactgctatacggcaacagaaggaagtatcattatcactttgaaaccggagtatttaagcacattggcagccggaacacacagtattagtattgtttctgcaaatggagttgcaacagcagactttgaagttcaggaagcagatacaacagcagtttcaccgaaaaccggagataacgatcaggcagctttgtggatcacacttctccttctttcctgtggagcattgaccgtagtcggaatcagaaaaaaagtaagataagcaaaaaattaaagtgaaatgaacgacaacatgagctataagaaaaacctagtactcatctgtcaatcagcatggtgaactcaaagatattatcactctctttttctgttaggtacagagcatcgagattggttaaaacgattaattttttgattttttcattaacgctttgattctgagaaatattgatattggttccatcacctttgtcaacagccctgaagtcacgcataaaatttacaagatcataggaactgagcttgtttttgaaacatttgatttccaggattcttaaaagaaacaagctaaggcagcagattaaaaaatgccctgcaaggatatttattaaattttcttgtaaaatcaagcgttttaggtatatgagcaatttgaaatgtatgggggatttgaaaacg

SEQ ID NO: 14385 - DNA, 2124 bp, Unknown
  gut microbiota DNA sequence
acttgtggggaaatatgtgaatctggaatatactttgccgaataaacaggggggacgataatgcaggatgttatgaatgtaaataagaaagaatataaaattgtgaatttattaggacatggaaaaggtggttattcctatttggcagaacgggaaggtaaattttatgtgttaaagcagatacaccatgagccatgtgaatattactcatttggcaataaaatcgaagcagaacaaaatgattataacagactgctgcagacaggaatcagaattccaagaatgttagacattgatgtagcaaatgaaagaatattaaaagagtatattgatggaccaactatatatgatttagtgaaaaatgatgcaatgaaagatttgtatttggtgcaaatgagagaaatggcaaaggtagtatatgaagctggcttgaatatcgattattttccgactaatttcattgtacaagatgaaaagattttctatattgactatgaatgtaacaattacatggatgaatggaattttgaaaattgggggattaagtactggtctaagactccggaatttattgattatatggagcagcattagttatgtaactcaagattttgttcaatccaaatctcttataatcctcaaaacttgttgattttacacgaataaaaactatactatagatagtacctattattagagtcagagcgcagggcagaaaaagatacgaggaagtaatgatgagagcagaagataaaacaagaatgacagagggaagcatttccagaaaaattattttatttgcgattccgctgtttcttggaaatttgtttcagcaattgtataacacggcagattcactgatcgtaggaaattatctcggcagcaatgcgttggcggcagtcagctcatccgggaatctgatttttctgatggttggatttatcaatggcatcgcaatgggtgcaggtgttgtaattgccagatattatggagcgaaagacagggcaaatctggagaaatcaatccatacaacggttgcgtttggaattgcagcaggaattgcattgacagtgatcggcatgcttttagcaccgaagattctggtgctgatgggaacacccgcagaagtgcttccggaatctatcacctatttccgcacttattttgcaggctctatcggagtgatcatgtacaatatttttgtcgggattttgcagtcggttggcgatagcagacatccgctgatttatctgatcatttcttcctgtatcaatgtggtgctggatattttctttatttcaggattggggatgggagtcggtgcagccgctttggcaacagcgatttcccaatttataagtgcattcttatgtatgatccatcttctgagagcaaaagaagaatataggcttcagttaaataaaatacgttttgacagccagatgctgtggcagatcatacaaaacggtgtgccgtccggttttcagaattctgtgatcgccattgccaacgtttttgttcagaccaatattaatgcattcggaaaaatggcgatggcaggctgtggctcttattccaaaattgaaggatttgcgtttctaccggtgacgtgttttacaatggcacttacaacctttgtcagtcagaaccttggtgcaaaacagtatgaccgtgcaaaaaaaggagcgaggtttggcgttctctgttctattatcattgcagaattgatcggaattgtgatttatatagcagcaccggtgcttattgcagcctttaacagtgaaccggacgtagtacattatggagttatgcagtcgagaaccattgcattgttctactttctgctggctttttcccactgcatcgctgcggtgcttcgcggttcgggaaatgcatcggttccaatgatcgtcatgctgtgtgtatggtgtctgttccgtgtaagctacatcacggttacggttcattttatcccggacatccgcgtgatcttctgggcgtatccattgacctggagtattagttcggtcattttccttgctttatttttgcgtggaaaatgggtgtatgggtttgaaaagagaaaataagcagtttctgttcactcagcacctgaacaccatg

SEQ ID NO: 14386 - DNA, 102153 bp, Unknown
  gut microbiota DNA sequence
gacctgtgaactgtaacaataagcagcatatccggcgtaggggaaaagcttgacaatttcagctttacgtctaaaatatatcgtatgaatttgaatgagactgatgcataaaagaatgtatcagtcttatcttatgcagaggagaaccggaatttatgaaaaaaagtggaaccatgaaaaaaatgctcacctattataaaccttacatgcgtgtgttctggacagacatgttttttgcaacgctctctgcggcggttgccctgatcattccactggtcgtgcggtatgtgacctacaatcttgtgtaccgtgagccggtagagattttgcatcaggcagcatacattgccattggactgtttgcgctggtggcggttgactgttacagtaaattctacatttgtaattatggacatgtgatgggagcgaaaatcgagtatgacatgcgtgcggaaattttcgcacattaccagaagttatcattttcgttttatgatgatcagaaggtaggacagctgatgagccgtatcacaaccgatctttttgatatcagcgaactgatgcatcatggacctgagaacatcattttgtccgtgatcaaaattgccggagcgctgatcattcttgtgaacatcagcccaatgctcgcagttgcagcctttgcaattctgccgttcatgctgctctatgcatttgtcctgaataaaaaaatgcgtctcgcattcaaacagaaccgtgtaaaaatcgcagacatcaatgcgcagattgaggataacttatccggtatccgggtggtaaaatcttttgccaacgaagagattgaaaaccgcaagtttaaacaaggcaatgacggtttccttgcagccaagaaaaacagctatttttacatgggaagttatcaggcaggacttggagcgtttacgacactcattcaggtcagcgtgatcctgacaggtacggtgctgatcgcaaaaggcagtgtggatgtcagcgaccttgtcacatttatgctctatatcagtgtgtttacggatcctgtccgcaccctcattgatttcacagagcagttccagaacggttataccggatttgagcgttttcaggagatcctcgccattcagccggatatcgaggacaaaaaagatgcagtggaacttaaggatgtaaagggagatattacttttgaaaatgtttcattccagtatgaggaaaacacggaaaaagtgttgaaccatatcagtttaaatgttccggcgggggcttacatggcattagtcggttcctccggcgcaggaaaaagtacgctctgttccctcattccacgtttctatgacgtgacgggcggcgcagtaaaaatcgatggaaaagatgtgcgtgatctcaccttaaagagtctgcgcgaccacatcggcattgtgcagcaggatgtgtatctttttgttggaactgtttttgacaatatccgttacggaaaaccggatgcgacaagagaggaagtcatcgaggcagcgaaaaacgccaatgcgcatgagtttatcatgtcgcttccaaatggttatgagacggacatcggacagcgtgggatcaagctttccggcggacagaagcagcgattgtccatcgcaagggttttccttaaaaatgcaccgatccttatttttgatgaggcaacctccgcacttgacaatgagagtgaaaaagtagtacaggattcattggagaagcttgcaaaaaaccgtaccacatttgtaattgcacacaggctttccaccatcaaaaacgcagagaagatcattgttttatctgaggatggtatcgaagaatcaggaacacatgaagaactgatggacaggaagggaacttacgaaaagctttacaatatgcagttccacaaataaaatgaaagcagcagaaaaagaggagaattgatatgccggaacttatccgtaaaaaaaagaaaatgtcatcgtttgagatgatcgcatttggatttgcaggagtgatattacttggagcaattattttaatgcttccaatctcatcttctgccggagttgtgacaccgtttgataaaactttatttactgcgacatcagctgtctgcgtgacaggacttgtggtcgtggatacaggaagttactggtcggcgtttggtcaggcagtgatcttacttctgatccagaccggtggattgggagtcatcactgtggttgcatctttttcaatggtttccgggagaaagatctcgttaatgcagcggagcacgatgcaggatgcaatttcagcaccgaaggtaggtggaattgtccggcttacaaaatttattttacagggaacatttctgatcgaattgatcggtgccattctcatgcttcctgtattttgcaaagactatggatggaagggaatctggatgtcagtcttccattcggtatcagctttttgcaatgcaggttttgacatacttggaacaacggaacaggcatttccatctctgacaggatatattgccaatccactgatcaatcttgtgatcatgcttttgatcgtgatcggtggcatcggatttctgacctgggatgatttttgtacaaacaaatggaacttgaaacgttaccgtctgcagagtaagattatcctcgttaccaccgctgttttaattttactaccggctctttttttctttctgagtgatttcgccggattttctatgggaaaaagaatactggcttctctttttcagtcggtaactcttcgaacagcaggatttaatacggcagatcttggtgcaatgaacgattcttccaaagcaatcatgattttgatgatgctgatcggtggatctccgggatcaacggcaggaggtatgaagacaacaacgatcgcagtgctgatactgaatgcatttgcaacatttggaagagaggcagaaacagaggtttttggaagaagatttgataacacagtggtaaaaaatgcagcaacgatcgctattttgtatttctttttgtttttcacaggtggaattgcaatcagtcagatagaacatgttgctttatcggattgcctttttgaaacagcatcggcagtgggcacggcaggacttacattagggatcacaacggagcttggactggtatcacatctgatattggttgttttgatgtatcttggaagagttggcggactgacacttatatatgctgcaatttcagtaaaaatccagagtggggcaaaaagaccgcttgataaaataactgttggataaaggagaaaattataatgaaaaatattttgcttatcggactcggaagatttggaaagcatgttgcataccagttgaatgagcttggacatgaagtgatggctgtggattcgaatgaaaatcttgtcaatgaaattcttccgtatgttacagacgcacagattggtgacagtaccaatgagaattttctggagtcgcttggaatcaaaaattatgatatttgttttgtgacgatcggaggcaatttccagaattccctggagacaacttctcttttgaaagaacttggcgctaaaatggtcatatcgcgtgcagagcgggatgtacaggcaaagttcctgcttcgcaacggagcagacgaggtcatttatccggaaaaacagatcgccaactgggcagcgatccgctatacggcagatcatatccatgattatatcgaagtggatgattctcatgctatttttgaggtggaggtgccgggaggctggatcggaaaaacgatcggtgaactggatatccgtaaaaagtacagcatcagtattctggcgatcaaaacagacggaaagatgaatatggcgattggcccggatatggaactaagcagtgaagatacccttttggttctcggtacatacaaggatatgcagaagtgttttcggatataatggataaaaataaacagggtataaaataattattaaaaattgcacaaaatttgcattttgtaaaataatcgagtaaaataggaatgttcgggcagaaagtgtgatccggacagacaaagataatacaatgtaaccatgataatctgcattctgcatattatcaagacataaaaaggagtggatttattatgacaaaaattgatattatttccggtttcttaggagcaggaaaaaccacatttattaaaaaaatgatcgatgaggtatttaagggcgagaagatcgttctgatcgagaatgagttcggtgaagtcggaatcgatggcggtttcttaaaagatgcaggaatccagatcaccgagatgaattccggctgtatctgctgctcattagtaggtgatttcggaaagaatcttcacgaagtgattgataaatatcatccggaccgcattctgatcgagccatccggtgtcggtaagttatccgatgtcatgaagtctgtgatcgatatcgagaaagaggaagatgtgaaattaaacggactcgtaacagttgtaaatgctttaaaagcaagcaaacagatgaaagcattcggtgaatttttcaataaccagattgaatatgctacagttgttgtgctgagcagaagccagaatgcaacacctgagcagttagagctttgcgtaaaacagatccagtcactgaatccgaaggctgcgatcatcacaacagcatgggatgcgatcaaaggcgaacagatcttaaaagtgatcgagggagcagattctcttgagatgaaactgatggctgagcagcatgccaaagaagaggcagcggagcatgagcacgagcatcaccatcatgaccacgaccatgatcatgaagaccacgagcatgagcatgagcacgaacatcatcatgaacatgatgagaactgcacctgcggatgccacgaccatgagcatgaccacgatcatgaggaccatgaccacgaagatcacgagcatgagcatcatcacgaccacgaccatgaacaccatcacgatcatgaagaccatgagcatcatcatgaacatgatgagaactgcacctgcggatgccatgaccacgatcatcatcaccatcatgcagatgaagtgtttacaagctggggaaaagagactcctcacaaattcacgaaggaaaagattgaggatgtattaaagacactctgcgagacagatgattacggaacaatcctccgtgccaaaggaatggtagaggatgagaatggttcctggatttactttgacatggttccgggcgagtatgaactccgtgacggtgagcctgactatacaggaagactttgcgtgatcggatgcaatattgacgagcacagacttgaagagttattcagaatctaatttatgacaatgaaatgttcgcaaagcgtacattttatgttggtaaggatcataattgcagctttgcagctatgtggaaacactggtacgaagctgcaattttaaagtcagaaaggaaaagaaaaatgaacgaaataccagtatatttatttaccggtttcatggacagtggaaaaacatccctcatcaaagacaccttatttgaacagggatttgccaaagaaggaaaaagtcttgtgctctgctgtgaggacggcgatacagagtttaccgaggaagaacttgcaaaaaataacgtaaaacttgtcatggtagacagtgagacagattttacggaagattttttgaaaaaagtaaacacagaataccagccggagcaggtttttctggaatataacggaacctggcagatgggaacacttatggatatggagcttccaaagtactgggtgatcgtacagcagcttgcaacggtggatgcaacaacttttgacatgtacctggcaaacatgcgcacgatgatcatggaacagcttttctccgcagatgtcgtgatcttcaaccgctgtgatgacagcacagataaaggaaaataccgccggaatgtcaaggcattaaaccgcaaggcacagcttgtctatgagcgcgctgacggttcacttgacgagagaccggaagaacttccatttgacattaatgcagatgagatcgaaattacagatgcagattacgcaatctggtacatggattgtcaggacaacccgaaaaagtatgagggcaagaaagtttctttcttagcgcttgtatacaatccggataaattgaaaaaaggaatcatggttccgggacgttttgcaatgacctgttgtgtggaggatgtcacctttatcggcttcaagacaaagtacgacagagagaatgagattccacacaaatcatggattcatattaccgcagaggttcatgtggagttcgcaaaagagtacaaaggaaagggaccggttttatatccagtttccattactcctgcagaaaaaccggaagatgaactcgtgtatttctcataagagcgggatagtcaggcgaccggaaatctatttatgtaaatttcaaaaaaggtgttgacaaagatacgttaatgtattaaagtaacaccataaagaaaaaccgttgagaaagagtagtaagtaatctgttgatatttcagagagctgcaggtggtgagattgcagtatggatctttttactgaatggactttcgagggtgacctgaacgatatacatgaagaacacgaagtaatgtatgagcagtaggagtcaccgggaaccgaacccgttatcaatcaggcgtgtatgatagtacatgagagagtggaccttatggtcaagatgagtggtaccgcgataataagattttattaccgtctcaagcaacagcttgagacggttttttatgtaataggaaacttcgtttccattacataaaaaacactccgtgaggatcgcactgcggcggataagaaacatgtcgcacattgcgacccgccgcaggcggagaatctcgcaggcgagattcttttttatacctgaaaacaaaaccgcaatacatgattcttaaaactttcaaaacggatttctttcaaaaaacattttttaaaatttggaggaaaaaattatgagaagaaaaatgatggcagcagtattaacaatggcaatggtaacagcaatggtaagtggatgcggaagcagcacagacacagcaaatgcaggtaacagcacgaacgaagcagcaagcgcagaaacaacagaaaccgcaaaagacaatgcacagaatactgcagacggaaccgtgtacaaagttggaatcgtacagtatgtagatgatgcatctttaaaccagattgaaaaagcaatcgaggcagagttagacgccaagggagcagaacttggagtaacttttgattatgcagattacacttacaatggtcaggcagattcatccacattgaaccagatcgcagccgatcttgtggcagagggagtggatgtgatcatcccaatcgcaacaccggcagcaatgatcatgcagaacgcaaccgaagataatcagattccggtagtattttccgcagtatctgatccggtcggcgcaggacttgtagcaagtgcagaggctccgggggcaaatatcacaggaacatccgatgcaattgatgtggcacagattatggacttcattgtagcagccaatccggatacagcaaaaatcggattattatacgataagagccaggattcatccacaagtgcaatcgaggcagcaaaagcttactgcgatgaaaaaggaatttcttatgtagagaaaacaggaacaacaaccggagaaatccaggcagcagccgattctcttgtagctgaaaaagtagatgcagtctttactccacaggacaataccgtaatgacagcagaacttgcaatttttgaaaaatttgcagacgcaggtatccctcactacacaagtgcagattcctttgcattaaacggtgccttcttaggatatggtgtcaactatgagacacttggaacaaagacagcagacatggtagttgacattcttgcaaacggcgcagatccggcagcaaccgcagtagaaacattagacagtggtatcgtaaccgtaaatacagagattgcagaaaagctcggaatcgattattctgtatttaaagatatgtgttctgaattgatcgaaacagtaacagcagaggagtttaattaaagtatgggttccattattacattatcaattgtacaaagtgcattagaacttggttttatctatgcattggtcgcactggcattattcatatcctttagtattttaaatattgcggatctttccacagacggatgctttactttaggatgtgccgtgtgcgcatccgtgacactatccggtcatccaatcttagcattatttgcagcgatggcagcaggtgtctgctccggttttgtgaccgcattcttgcagacaaaaatgggaatccagtccattcttgcaggaatcattgtgaataccggactctatacaattaatattgcagtaatgggattcgcttcaaacatgaacttattcaactgtgattctgtttttatctgggcaaaaacagcaattggcggaacgtggtacaaattgatcgtggcagcggtgatcgttttagtcgtaggagtgctgatttctttctttttaaataccagacttggactttccatccgcgcaaccggagacaatccggacatggtaagagcttcgagtatcaacacaagtgcgatgatcacaattggtctttgtgtggcgaacgccctgaccggtttatccggcggactgctcgcacagtatcagaaatcgtgtgatatcaaccttggaaccggaatggtaacgattgcacttgccagcctgatcatcggagaatctatcataggaaaaggcggcatgttacagcgtgtgatcggtgttatattaggaagctgcctgtatcgttttatcgtggcagttgcattaagactgaatgttccggcagagtgcttaaaacttgtgtcatccattatcgtagctgtggcgatcgcattcccgtatctgaaaaagcagatgaatttttacagacagaaacgtgcggcaaaggcacagaaccagatatacattcaggaaatgaggaaaaatgacagcgaaggaggagaaagataatggcagagaagaacgcaatgcttgtgatgcgcgatgtcagcaaaacttttaatccgggaactgtcaatgaaaaatgtgcattaaaggatttaaaccttatcttaaaaccgggggattttgcaacgatcgtaggaagcaacggagcaggaaaatccactctttttaatgcgataacaggagcatttttcgcagataaaggtctgatcatgttagacggcgaggatatcacgtatcagaaagaacatatcagaagcaaagtgatcggtcatctgtttcaggaccctttaaagggaacggcaccgcatatgacgattgaggaaaatatggcacttgcttatcttcgtactacaacttcaaaaaatgcttatttcagccgcatcaaggctgctgacaagaaaaaattcagagaacagcttgcgttgcttgaaatggggttagaagaccgcatgaaacagccggtcggacttttatccggcggacagcgtcaggcacttacccttttaatggcaacgatggtaacaccaaagattttactgttagatgagcataccgcagccttagatcctgcgacagcggagaaagtgttaaacctcacaaaaaaaatcgtggcggagcagaacatcacctgtcttatggtcacgcacaacatgcatcaggcgcttgagcttggaaaccgtaccctcatgatggattcgggaaatattgtgctggatgtttccggggaagaacgggaaaagatgtcagtggatgatctgttagagcagtttgcagtccgtgccggaaaggcattggataatgacagaattctgttttccaaagtggaggcataatagtggtgtagtaagaatagaagctataaataattagtatgtttcaattatatgaaaaagcaataaaacaagggaaaagccgttgaaatctaacggcttttcctttattatataaagtaatgctaaaaaaatgtatattttcataggagattcgtgattaagaaaaacgattacagagatgaaaaaggcagtgagtatatacaaggaggaaaaacatgtatccaatcgttagaagagaaaaactggcagacaagatctatcttatggatgtcaaggctcctcgtgttgcgcagtattgcgaaccgggacagtttgtgattgtaaaaattgatgaggaaggtgaacgtattccgcttaccatctgtgattacgacagggaagagggaacaatcacaatcgtattccagaccgtaggagcttccacagagcgtatggtaagcttacaggaaggggatgcttttgaagattttgttggacctttgggatgtccatctgatctgatccatgaagatattgaagaattaaagaaaaagaaaattttatttgttgcaggtggtgttggtacagctccggtttatcctcaggtaaaatggctgcatgagcacggcgttgactgtgatgttatcatgggttcccgtaacaaagatttactgatcttagaggatgagatgaaaaaagttgccacaaacctttatgtgacaacggatgatggctcgtacggtttcaagggaaccggtactgcacagctgcaggaactctgggataatggtaaccgttatgaccactgtgtggcaatcggaccaatgatcatgatgaaatttgtctgcaaattgacaaaagaattaggaattccaaccgttgtttccatgaatccaatcatggtagacggaaccggaatgtgtggtgcctgccgtctggttgtaggcgatgcggtaaaatttgcatgtgtagacggaccggagttcgacggacatctggttgattttgatcaggcgatgagaagacaggctcagtacaagaccgaagagggaagagcaatgttgaaattacaggaaggtgcaacacatcacggtggatgcggcaattgtaacagttaaaaatcagaaattttgcagatcagagagaaagctgtctggtcagttacatagaatcaggaggaaaaaatggacgtattaactagagttccggttcgtgagcaggagccagccgttcgtgcagcgaactttgaagaagtatgtttgggatataacgaagaagaggcaatggcagaagctgcccgctgcttaaactgtaaaaatgcacagtgtatgaaaggatgtccggtatccatcaatattccgggatttatcgcagaagtaaaagaaggtaattttgaggctgcttatcatgtgatcagtgagtcttccgcacttccggcagtctgtggccgtgtatgtccacaggagacacagtgcgagggaaaatgtatccgtggaatcaaaggagagcctgtagcgatcggtaaattagagcgttttgttgcggactgggcaagagaacatggcattaaaccgaaaaaggcagaaaagttaaatggacataaagtagcagtgatcggctcaggcccggcaggtcttacctgtgcaggagatcttgcaaagcttggttatgatgtgacgattttcgaagcattacatcaggcaggtggtgtgttagtttatggtatccctgaattccgtcttccaaagcagaaggttgttgccgctgaagtggaaaacgtgaaagcattaggggttaagattgagaccaacgttgtcatcggtaaatccgttacaatcgacgagttgatggacaacgagggctttgaggcagttttcattggttccggtgcaggacttccaagatttatgggtattcctggcgagcaggcaatgggtgtattctcagccaatgagttcttaacaagaaataaccttatgaaagcgttcttagacaattacgatacaccgatcaaagctggtaagaaagttattgtagtcggcggtggtaacgtggcaatggacgctgccagaacagcaagaagactgggtgcagaggtacatatcgtatatcgtcgtggtgaggaagaacttccggcccgtaaagaggaagtacatcacgcaaaagaagaaggtatcatctttgatcttctccagaatccaaccgaattattagtggatgaaaacggttgtgtaaagggtgcaaaagtgatcaaaatggaacttggcgaaccggatgcttccggaagaagaagtccggttgaaattccgggctctgaatatgagatcgaggcagatactgtgatcatgtcacttggtacttctccaaaccctctgatctcatccactacaaaaggtcttgatatcaaccgcagaaaatgcattattgcagaagaagagaccggtgcaacttccaaagaaggcgtttatgccggtggtgacgctgtgacaggtgcagcaacagttatccttgcgatgggtgccggtaaggcagcagctaagggtattcacgaatatctcagcaataaataaaaacagacaggacagggcaggtgctgaatgggtcatacatttggcacctgtttttttctgtaagtattccaaagaaaccccaaagttttattaattttttatgaagagggtagcaaaattacagggtttatgtatataatagaacacgctacgcaagaaagaaatacgagagaggttaccgatagatgaaggagcagaatcagcgccagatacagaatcagacagaattagacgaaagaagactgagacagaaaaagcttgtacggaaaagaaaaatcgttttgagtgtaatgcttttgacatcttttttactgggatgtgtctgtggaagatattttcctgagatcgaacttggaaaaacagaagaagtgctggcatcagcgcaggataactccgatgaagagaaaaaagaaaatcaaattacaaatgacgtggataatggaacaacagcagatggaacggaaaaagtggaacagtctgctacggaaactgtcgaagaaccggcagacagcgaagaaacgaatgatccgtttgcggagattccacaggtcgtgttatcaaaaccggtagattattccttaaatcaggcaatcagacagttagaacagatggaagcggcagatgaacgctacgcacagatcgtggaaaatgcagagaaatatccggaaaaattactgatcaatttggcaaataatccggaaatgatcgcatttgtagctgattacaaagggaacacaagggattatgataaagcagaactgacagagaaagagttacaggaagaatatccgctctttttacagtgggataaacgctggggctgccttgcatatggggatgacagcaatgttgcaatcagtggctgcgggccgacgacgctggcaatggcagtggtcgcactgactggaaatacacaggcgacaccggcagcggtcgcaaagtttgccatgcaggaaggttactatatgtctggtacaggaaccatgtggtcactcatgactgaaggggcggcagcttatgacgtccattcagaacagattaatatcagccagattgaaataaaacagcatttagatcagggagatatcgtgatctgttcggtgagacagggtgattttacaactggaggacattttattttactttatgattatgatgacgagggattttccataaatgatccattctctttatatcgcagtggacagaaatgggattacggaaagatcagaagccagatcaaagcggtctgggcgcttcgtgcaaaataaaaaggaatgtaaaataagaagtaaagaagaacacgtcagttccggcaatgtttgtcggttctgacgtgttctttcttttataagaaaataatacactatcctaataaagttaggcagcttcgtgtgtgtgttccttgcggctctttttctcccagataaaataagttacgatcagaagaataccagtgatcagccaggtaatcgggcttgcgagacggacggcccagtaaccgaacggatttaaggtgacggcgatcacgataatacggcacaccatttccacaacaccgcttaacattgggacaagtccgcggtttaagccctgcagggcgttcctgtaaaggaaaatccatgcgagcggcagcatgaagaaactgatggtgttcagatactgcatggcatagtcaaaaatttcttcagtaggattgctcacaaaccagctcacaataaaacgtccgccgaatacgcagatcgcagatgcggcaagcgagatgaaaatacagatgaaaaatcccttccgcattccttcatagatacgtttgtattttccggcgccgagattctgaccacagtaagttgcaatggcagtaccgagggtaggcattgtctgtgtagacaggttttccaccttggaggcagcggtaaaagcagccacaacgctggaaccgaaaatattgaccgctccctgtaaaatcatagttccgatggctgtgatcgaataatttaaagccattgggattccgatggaaagcatattgcgtactccatgaccgtcgaggtaataatcttcgcggcttgtttttaaaatatcaaacttgcggaacatgtaaataaaacagagaagtgcagagacaccctgcgcgatgatcgttgcgtaagcggcgcctgcggttccgagttttatcacgataatgaaaaacaggtcgagtacaatatttaaaaaggaagaaagaatcaaaaagtaaagcggtgttttgctgtcgccgattcctcttaaaataccggatgcaacattgtaggacatcgtgagcagaataccggcaaaaatcactttgatgtaagagtctgccagacctaaaatattgtccggtgttttcattaatataagaaactgccgggatgccgccaccgttggaactgttaagaccaatgatacaatagcggtcagtatcagggagagggcaacataatgttttaacagtttaaaatctttcgctccaaaggcgtgggagaccataacgccaaatccctgtgcgattccgtttgcaaatcctaataccagaaacatcaggcatccggtagaacctaccgcagccagcgcatcttcgccgagatactgtccgacaataatcgtgtctaccatgttataaaactgctgaaagatattcccaagtaaaaccggtacggaaaaaagtaaaatcatcttaagcgggcttcccgctgtcatgtcttttgtcataatcggatactccttaaattcctgattgaaattaaaaaaatacttgcatttttttagcttgaacgcttgtgttatcagtgtttcagcaacttagtataaggcatgggatgtaaaaaaacaatgcttatttttgcgaaaaagtattctttttttgtcctgtttgtttaaaggcggatcaggaatagaaatttgcatctgtaacatgaaaattgctttgaacgacaatggacacttgcgtttacttttgcttatttgcaaacaaaaataaaaattcaaaaaggtggaggtattttacaatgaaatttttcgtagacacagcaaatgtagaggacattaagaaagcaaatgatatgggagtgatctgtggtgttacaacgaacccgtccctgatcgcaaaagagggaagagatttcacagaagtgatcaaagagatcacatcaatcgttgacggactgttcggagaataaggatatagaacatagaactttgattcagcttttgaaaacagagcttatcataaatgatattacagagaagggaatttgacgaagaaattgtagtgaaagcagcaaaagaatgtggtaaaatagtgaccgtagaagaacattccgttattggaggactcggtccggcagtggctcttctcgaaaaatatggcttgaatgcagagggcatttataagtcagtgaaagagtttatataggatatatgcagactaaccttgaatattataagattttttattatgtatcaaaatacagcagtatttccctcgcagcagaggcgctctccatctcacagccggcagtcagccaggcagtcaagcatttagaaagtgatctttcctgcgctctctttgtgcggacatccaaaggcgtgcgcttgacaaaagaaggcggactgcttgcagaatatgtgagaaaaggatatgagacaatcctcaccggggagaaaaaactctcggagatgttaaacttagatgctggagaaatctgtgtgggtgccagtgacatgacattgcagttttatctgcttccttatcttgagacgttccatgatgcatttccgcagatcaaagtgactgtgacgaatgccccgacaccggagacgttgaaacatttgcaggacggaaaaattgattttgggatcatcagtaccccggtgaacaacaaatacgattttaaaatgacgcctgtgcgcaaaatccaggatgtctttgtggcgggaaaaaagtttgagtacttaaagggtggaaaattaagctataaagagcttgaaaatcttccggtgatgtgcttagagggcagcacttccacaagaaaatatgtagaggattatctggcagagcgcggcacatttgtccggccagaatttgaacttgcgacaagtgacatgctcatccagtttgcagtgcgcaacctcggtgttgccagtgttgtgtcggatttcgcagaaaaatacattgaaaatggggaattattcgtattgaaatttgacagggcgataccggaacgcgagttttgcattgtctcaaacgagcgtgcgccgatgtcggcagcagcggaaaaactatacgattttctgcttgttccgtagtgaaaatgtcagaaaaagttcatcaattcttcatcaatcttaatagaatattaatgggattacaggcaggaatatgataaatttatatgcaggatcaggatatttagggggaaacgtaaatgatgcgtttattatcgatcgggatagactgtgtctcgtctgctatttttgtgattcctgctttggctattttgcagtgtacaatctacaggaaatgggaatttaaaccattttgtgtaaaactgatatttgcattttatgcgattgctctgttttcggttgtgggtgtccctgaggttggaacatttcagatggattttggcctgaatctgataccgtttgtagacattgtaaatagtccgtttgcatatatgaaaaatacgattctgaatatcattttatttataccgatgggattttttgtacctgcagtctggaagaatttccggtctttcaaaaccatgtttttcatgggactcgcggtatcactggggattgaactattacagatatttacattccggcttacggatattgatgatctgatcaccaatacggcaggaactttgataggatatgaaataagcagaaaattctctttttcgttctctttaaaaacagaggaatcgaaagaaagtttagtacgatatgaacctgtcctgattcttgcggttatgcttttgatttcaatgtttctgaaaccgatcgtgtctgatggcatatggaatatcatgatataataagactgccgagcgaagcgagtgtagataacgatcatgaagctttgcttcatgatataatgaacaattatatcaaatataatgaatattaattttacttatgacatatattcgtgtataatcataaagtaaaaacaggaaagcgtgatggtttttacagaccatcactttttttatgcaggaggaaaatcaaatggttacagcagtagtaggcgctaactggggcgacgagggaaaaggaaaaatcacagatatgcttgcagatgaagcggacattgttatccgttttcagggcggagcaaatgcaggtcacaccatcgtaaacaactatggtaaatttgcattacatacattgccatccggcgtattccacagccatatcaccaacattatcggaaatggtgttgcactggatatcccgaaggtaataagtgagatcaaatcgatcacagaccgcaatgtgcctgcaccaaaaatcatgatttcagatagagcacagatggttatgccttaccacgttcttttcgatcagtatgaagaggagcgtcttggaaagaattctttcggttctaccaagtccggtatcgcaccattttattcagacaaatatgcaaagatcggttttcaggtaagtgagttattcgatgaggaattattgcaggcaaaagtaaaacgtacctgcgagacaaagaacattatgcttgagcatatgtatcacaaaccattattaaaagaagaagagttattagctactttgcatgagtacagagacatggtcgctccatatgtcggagatgtttctttattcttagacaaagcgattaaggaaggcaaaaagatcttattggaaggccagcttggtactttaaaagatccggatcacggaatttatccaatggtaacatcttcctctactttagcagcatacggtgcgatcggagcaggcatcccaccatatgagatcaagaagattgtaacagtaagtaaagcatactcttccgcagtaggagcaggagcattcgttagcgagatctttggagacgaggcagacgaactgagaagacgcggcggagacggcggtgaattcggagcaacaaccggacgtccaagaagaatgggatggtatgactgtgttgcaagtaagtatggatgccgtctgcagggaacaacggatgtagcgcttaccgtacttgacgtattaggatacttagatgagatcccggtatgtgttggatacgatatcgacggagaagtaaccacagacttccctgtaactgcaaaattagagaaagcaaaaccggtattaaagaatcttccgggatggaaatgcgatatccgcggtattaagaaatacgaggatcttccggaaaactgcagaaattacattgagttcattgaaggacagatcggatacccgatcacaatggtttctaacggaccaggaagagaagatatcatttatcgtaataaataaaaagactgaggcaggcgtgcagtggcaccctgccttttgtggagaaaaaatcctctcctcgctagtaggttaaattttactttgtaaaattggatttttgcttcgcaaaaacaaggaggatatatggttaaaaatataattttggatgtcgggaaagtgcttgtggcatgggagccggaagccgcattgcaaaaactgggttttgatgagaaaacagtcaaagcagtagcggaggcgacggtcaatacaccaatctggaatgaaacagaccgcggtgtctggccggatgagaaaattctgaatgctttttatgaaaatgcaccggaatacaaaaaagaaattgatctgttctggaatcatttggaagatgctatcgagcagttcccttatacaaaggaatggatttccaacatgaaaaaacagggacttcatgtatatatattatccaattacggagcatggacttatcagagaacgaaagacaatgcgttagattttttgccgctgacggacggagatgttttttcttacacggtaaagatgatcaagccggatgtagagatctatgagacactactgaaaaaatatcagctcacagcagatgagtgtgtatttatcgatgaccgtatggaaaatattgagggtgcaaaaaaagcaggaatccacggaatctgttttgagacgattgagcaggtcaaagaggatctgaagaaatataacgtatatgcgtaaaaaggggacgcaaatggaacaacgcagacaatcatctggtaaattgccgggtatcacaagggaggcggaggaggcgcatcttgcgcagaccattgagatcacgcagcagaatcttgataaaaacatcgcgcaggagcaaagcctgaaagaggacattcatacgttattggaaacctatggagcgaaagatgtagaggcgctttcgctgatcgacaatacccagctcatgtatgagacagtgaagcgtgacaggagcagattagaaaaagcgcggaagaagccgtactttgggcggatcgatttttatgatgaggattcgaaaaaagatgaggcactctacatcggaagggttggaatctcaaaaaatatcatcgacaaagtggtcatcgactggagagcacccgtggcgtcggtttattatgagaatgcagtcggaccgtgcgaatatatggtgcagaatgagaaaacttacgcgatcgatcttctgatgaaacggacttatgagattgaaaacgataccttaaaagatttctacgattcggatgtcgtggcgaatgatgaacttctcacaaaatatctggcaaaaaataaaaaagcagtactcggtgagatcatcgcaaccattcagaaggagcagaacgaaattatccgaaaatctccgaaacagaatgtgatcgtacagggaagtgcgggttccgggaaaacaaccgtggcaatgcaccggatttcttacattttatataattatgacaaagagttccgcccggaggatttctatattatcggaagcaaccgcattttgctgaactacatcacgagcgttttgcctgatctggatgtatatggaatccggcagatgacaatggagcagcttttcacaagacttttgtatgaggactgggacgagcatacaatgcgcgtgcatgcattggagaaagaggacagcttcatccatattaagggaacactgttctggttccaaaatctggaggagtactgcagaaaactcgaagaggagacgattttagcggaagatattttcttagaagttccagtgaaaaccagttctgtaaggagaacttcaagtaaggtaacatttcaaaaaacgagcaaaattcttctgaccgcagaagcgattgcagcttatttgaacgaaaacccggaggtttccatccagaataaaattgccatgttgaacaaacgtgtgatggcaaaagtgcacaacgagatcactggaaaagacatccggtacacagcggacgacaagcgtgagatccagaaaaaataccggtggtattttggcggaaaagagtggaaaacttctatctttgagctgtatgcggattttttagaggagcagaggttaaaaggctatcagcttcctgtgccggaaaatgattttgatgtctatgatcttgcagcgctggcatatctttacaaatgtgtgaaagagatagagcttgtgcgggaagcaagtcatgtcgtgatcgacgaagcacaggattttggcatgatggtttacagtgtgctgaaattctgcatgagaaactgtacatttacgattatgggtgatgtgtcgcagaacattcattacggatatggtctgaatgactgggaggcactgcgcaaattatttctgacaggcccttatgacagctttgagctgttgcgcaagagctaccggaatacgattgaaatctctaattttgcaatgcgtattttgcagcacggcaattttccgatttatccggtcgaaccgatcataagacacggaaaagatgtgacgatggcgcagctttcggatgacaaagagttataccgctacacagcagagcaggtaaaacactggcagaaagagggacttgaaaccattgcaatcgtatgccgggatgaaaaagaggcagagaagataaaaaagaagcttggcaaaaagttgtccgtcacaggtgatgatctggaaaacacagaatttggaagcggtgtcatgatccttccggtagcgtataccaaaggtctggaatttgacgctgttttgttgtttgacccaagcagagaaaaatatccgtcagacgacgcgcatgtaaaactcttatacgtggcggcaacaagagctttgcacgaacttgcggtgttatacaaagatattctgaccggactgatcgctgatccggtgccggagcgggagcagaaagttttcaaagtcgaagagaaaaagccggtgcggagagtggtcaggaagcctgaagtggtggagaagccggagttatctgagaagccaatcacaaaacccaaaaccatccagaaatccatgaacctctccgaacaccacacttccgaattatcgggtgtgcaatctgtccataaattcggagatattccggacaacagtatcctgcgtccatcgggacatggcaggatcgacacagctgtccgttgggcggagcagacggcgtgcggtgttgcctgtgtcagcaactacggtgtactccatgtcagtccggtgaatgacaccgtgatccgtgtgacattcggcgcagggcagaaaataaaagaattgttccagaacagccagacgaaaatgaagtggcagcagaaagagacaagagaggcaatcttaataaacacaaaagagatccagcttaccgtcgacaaaaaaagtggtgccatctcctatgccaatgccgccggaaaaacagtgctgaaagaaaagacagctccaccgagacagatggatgtggtgaaaaaacagaactggatgtactttgactggtcaagatcggaacggctgtcagccaagggtgttttaaaggatgacaggcttccactcaaaaatgcgacaaaatacatttgttatggggaaaaatccaaacgttttccactggtgcattccaatctcggctatggaattgcagtggcagcggacagcgatgtattatgctgtaacattccgatgtatggaccatacatttccacagagcatatggagctcatcgactactattttatcattggagcgacagaagcggatgtgatcaaccgctatgtggaatttatgaacggctaaagccagaaagtgaaaatgtcagatgaatttcacaaagttatcacattttttcccaaaagaaaacacattttttcgataagatagtactatcgaaaaccgacagttgcgaaattcgtaaaaacagacggatttcgcgattttcatgcgagccggaagtaaggaggaaaacattgtgatcgagatcagccatctggtaaaaaaatatggcgaccatattgcagtgaatgatctgacattgactgtggaaccaggaaaaatttatggatttttaggaccaaacggcgccggaaaatccaccacgatgaacattattacagggtatttaggtgcaaccagcggagaggtaaaaattaacggatttgatattttcgcacagccggaagaggcaaaaaaatgcgtgggatatctgccggagatcccgcctctttatgtggatatgacagtcagggagtatctgaacttcgtggcagagttaaagaagctcgaaaaaagtctgagaaataaatatgtggaggaggcgatggagacgaccggaatcaccgcacagcagtcaagactgatccgtaacctgtcaaaaggctacaggcagagagtcggatttgcacaggcagtgctggggtatccggagattattattctggacgaaccgacggtcggacttgatccaaaacagatcatcgagatccgtgacctcatcaaagaacttggcaaaaatcatacggttattttaagttcgcatattttgtccgaaatatctgcagtgtgtgatcacattttcattatttccaaaggaaaattagtggcaggcgattccacggaaaatctgatgaaacagatgtccggggcacaggagatcgaacttctggtcaaaggagacaatgcggcagtgcaggagacatttaccgggatcgcagaagttgaaaaatgcattccattagagcagaaggacgaagcatgtgcacatctgaatctgatcgcaaaaccgggaatggatatcagggaacaggtgtttgactcctgcgtcaaccatggatttgtcattctgcagatgaatcccgtttcaaaatctcttgaggatgtgttccttgaaatcacggaaaaagaggggacacggaaggaagttctgccggagaaaaaactccattttgtaaagcctcattttggaaaagaaagtaaggaggacgggaaataatgtttgcaatattaaaaagagaagtaaaagcttactttcagacggtgacaggatggttgtttattgcagcagttcttgtactctatggactatatttttatgtttacaatctgcgcgcaggctatccttatatttcttactcactgtcggcgatcgcatttatcatgctgatcacggtaccggtgctgactatgcgcagttttgcggaggaacgccacagcagaacagaccagttgatcctgactgcaccggtatctgtgggaaaagtagtattgggaaaatatctcgcaatggcttctgtatttaccatagatatggtgatcattgcgatcacaccattgctgttaatgtcctacggaacgatcccattaggtgaatcctatgcagcagtgcttggattctggctgtacggctgcgcctgcattgccgttggcatgtttatttcctcattgaccgaaagccaggtgatttccgcagttttgacatttgttgcattatttgccggctatatgatgggaagcatttgtaatttgatctcagagagcggaaatcttctgacaaaaattttaggctgctacgatttttatacgccgcttgataactttatgaatggaacattggatgtggcgggaattgtctattacgtaacgatcattggattacttttgttcctgacagggcagtccgttcagaaacgccgctggagcatcagctcaaaaaaaatatcgacaggtgtattttcaacgggaatgatcattgcaatggtggcagtgaccgttgttgtgaacctgttcgtggcagaacttccggcaacatggacatccattgatgtcacttcaacgaaaatttattccatcacagacgatacgaaggattatctgaaaagtctcgacgaggatgtgacaatttatgtggtggtgtccgatgcatcaaaagatacaaagctggatgagacattacagagatatgaatccctgtcgaatcacatcaaagtttcctatatcaatccggctgcaaacccgacttttgctgcgcagtatacagacagttctgtaacttcaaacagcatgatcgttgtgagcagcgagcgttccagagttattgattacaatgatgtgtatacctatagttatgattacagcagttattccagaagcattgatggatatgatgcagagggacagcttacaagtgcgattcagtatgtgaccatggattccacagagcttccggtgatttatcaggtatccggacatggggaaacagctttgtccggtggatttacagaggcaattgaaaaagcaaatatcacattatctgaccttacattattaaaagaggatgcggttccggaagatgcagcagcgttgatcattaatggaccgaccactgatttttcgaaggatgatgccagcaaagtgatcgattatatcaatcggggtggaaaagtgctgatcacctgtaattttcaggcgcagggtctggaaaacttcgagtcaatcctgtcggcatgcggcatggaacgggtttccggtattgtcatggaaaatgataaatcctattactatagcaatacaccgtattatctgcttcctgacgtaaattcaagtgcatatacaagttccgtcagcggttcatatatctttgctccatacagcgaggcaattacctatggagaagatacagatgatacaacttatacagcattattggagacgacagataaagcagtatccaagacagatgcagcaaatgcaacaacatcagagctggaagagggagatgctgcaggatcatttgcggttgcggttgccatggaaaaaacaatcgatgaagatacagtcgcaaaagtagtggtcgccggatctgtggaaatgtttgcagacagtgcagaccagatcgtttccggaaataacagcgcaatgtttacagatatcattgcccagatggttggcgattctgatcttgcaacaagtgtgatcccaacaaaagattacacgctcagcgccatcacggtggatgcggcggcagggattctgtatgggcttggtctgatgatcgtgcttccggtcattatgatgattcttggaattgtgatatgggcatcaagaagaaaaaaataaaacaatagatgatagaaaatcaagattggagatagatagaatatgaaaaaacagaaaattcagtttattgtaattctgattgtgctggcagtgcttatcgctgccaccttcggaatgaaatggtataacaaaaataaagaggaagagaaaacagcggaagaagaggcttctaccatttatatttccaaagtggacgttgacacgatcacagcattttcttatgaggttgaccatgtgacgtatacttttacaaaggatggggatacatggacctatgacggagacacatcactggatatggatgaagaagcgatcgacagcatgctttcaacactgtcatcgctgacagcaatagaagagatcagtgattatacagatctgaaagagtttggatttgaccagccggaagatctgatatcctacacaacaagtgaagggtctgtttctctttttgtaggaaataaaaatgatactttgaatgcatactatattatttcagctgatggaggaagtatttatctgacagaaacgtctcttgcggatgctttttccaaaacgattgaggagctgacagtcacggaagatgcggagagcacagagagtgcagaaggtacggagactgttttagatacagagagcgtgtctgagagtacagaagaataaatgagataaaaacagaatcagcacccgacagaaaatttggtcaggtgctgattttttaatgctctgcagtatctttctcttcggaatccttcttgatcagtttgtaaataaaactgtatgcccagatcaaaacagggatgatcacagaggcataaatagatgtcatgagcatgttcataaaattttcgctggcagaaactgcacagacgatggtagaaacgtaaagtccaaccagaataatgacaccgatgattgctaaaatttgttttacttttttcatattttgaatcctttcaggaaaaatcgaataagttatggtataatgagcgcaagcgaaaagaacatatttatatgttcggcgagcggcgaaattattaagtgatgaaatcacgatataatcatcctatcggaaaaaaacattttcgtcaataaaattgtggaagaaaaggcaggtaaatctggtggcatatgaaaagcttttgaatgaaatttatgcggcggtatcattgaaatatctgtggaaggaatacgaaccatattttatgaaaagtgaatcgccggactggattaatccaaacatggatttcgggctggaagtcagtcaggcacttttgccggatgacgggcaggaggagagttttatcgaaaaatatcttggctgccggaaagaggaactaccttctttggcgtttgataaatatggagagcggctgaatttttacaatggaaggttttgggcgattctgccagataataccgtgcagcaggattatctttccaaggcgaaatatcgttttgatcgcaaactggaaaaactaaatgcaaattatatccataagcgctacaatggtctgtatctttttctgcatccgacagacgagaatgatattgatgcaggtgcactgtttgaatatatgagatatacacaggaaaagaaaaaaatgcgatttgaccgggtatttttaaattgtgtcaaaaccatttacgtctgcaattacgaaaacaatacgattgagccgattgtgctgccgccaaatgcggaaaactttttgaatacagaggcggagtacctccgcaattgctgtgactggaaggatgggacagcgctggagatgaagcgtggcgatgagagcttttaaatgggtgtagaaatatgattggaggaaaatagaatgaacggtatctttcgcagagtaagtatcagaaaatatcaggaaaagaaaattgagcaggaaaaagtggaacaactgcttcgagctgcaatggcagcgccgtctgcatgcaaccagcagccgtgaggagctggctcttccatttcaatcattcagtcaaaatgcaaaagagcaggaaaagttataaatgtcaaaatcaaaatgtaagaggaaaattataattaaaagaatttgaaatctttagaggtataatacatatgcattaccatgaaatcgggaatggcataagaacgttgaagtaaaatgggtatttggagtagaaaataaagatgatagaaaaagtacaggaaaagagcaatacagaatgtgatgtgaactactattcatgggggagcgcaaggatcagccatatcctgcgaaatcccttttataagggcgcacatcttgtctgccggacgcaccagaaaggcatccgctccaatacctatgacattatcccccgtgaggaatgggaggtcattgagggctgccatgaggcgattgtgacgccggaggaatgggaacaggtgcaggaactcattgaccgcagacaaccattatgaaaggcaacgcctgccccttctataacctgttccatgggctggtctactgcgccacctgcgggaaatccatgcaggtgcggtatgaaaaggtcggcagaaccggcaagaaccgcttcaccggcgaaatgcgggagccgattgacagggcatactatatctgccagacctacaaccggctgggtaagaacgcctgtaccagccacaagattgaagcaagggatttgtataatctggtgctgaaggatatacaggaactggcggcgcaggccatgaaggacgccgatgcgttctaccagcggctcagcagctggatggagcgccggtatctggtggatgcttcccagaccgagaaggaacggaaacggctggaagcccggaatcaggaaattgacgggatgtttttaagcctgtacaccgataaggccaaaggcatcctgaccgaacagcggtttatgaagttgacggcggcgctggaacaggaatcgaaccagaagcgcctgcatgacctggcggtgatgcagagccgggctgacgcccaggagagcgaagtccgcacctttatcaaggaaatccggcgttattccgccattgaggtactggacgaggcggtactgaaccggcttatcagcaaaatcctgatcggcgaggtcaaaaaagtggacggccagaaggtgcaggaagtcaggatcgtttataactttgtcggggaaatcccggagattgcaacataaaaactttaccccctccctaaacaaccgagagatggggtaaaattttttgttgatcagaaatgtaaattaaaaagtgagtatgggaaaaatgctccaaaaaatgcaaatattgtttgcgggaaaagtctcaccgcttatgagaatgttcgtaatcagttaatgcctgtaaagctttgggagctaatgggaacagtgctatcatgttaaaaattgtcatcagaccgaccccaacgtctcccaaatcccatacaaactggtatgctgcaatgccgccgataaagagcattacaagggccagtaccttgtagagcgtctgagagagccagttatcgccaaacaaatacgccacatttgatcttgcataaaacaaaattcctaagaatgtggaaaagctaaataaaaacagaattagtgcgatgaacacaacaccaaattcgccaaaatagtatgccatagcagcttgcagtaaatccatacctgctaacccctcggttaattcctgaggcactaagagcataatcatcgctgtacaggtgcagattacatatgtatcgatgaatactccgagagcctgaaaaagcccctccttggcaggatggtcgatatccgcagcggcagccgcacagggggcggaaccagatcctgcttcgttagagaataatccacgcttcgcaccgttcatgatcgctgcgccgatacctccaccaacagcttgccgcagaccgaacgcctcgctgaaaatccggctcaaaacatcgggaagctgaccagcatttttgacaataatgaaaattgtaaggaaaaagtaacatgcggccatgattggcaccatgatatccagaactttgacagtggcgtttttccgcaacacaattatcgcagcaatagcaactagaaaaattgtggtatacagcggaggaatgtggaatgcattttcaaaagaagatgcgaccgagttgctgatcacctgactgattccacaccagcagagaagcccggataaggcaaacagacatgcgaagagggaatatctttgtctcttactccttgatgcgaacagtacgtggagataatacgccggaccaccacggtaaccaccatacagcggatccttttccttgtagatttgggccaaagtcgcctctataaaggcagtagatgcgcccaaaagtgcaatgagccacatccagaatacagcacctgcacctcctgcggagatggcagccacaacgcccatcagattgcccatgcctacgcggcaagccgtagatacaatcagtgcctgcaagccagagataccgtcagaatttttggttttgttattctctagtgttatacggatcatttctgggaacattcggagaggaagaaagtgagtgcggatcgtaaaatagattccggctggcaccaaaatcataaccagaagggatattcccagtgtacttcctcctggaagcgggatctgcaccaaatctccccataaaaagttataaattgcattaattaatgatatcatcttaaaaaacatcctctcatgatagggtaaaatttccaaatacaggtaccaggactcatttggcagacatgtgttctcctttaacatctggttcaatcaaaataatgaaatcggtagtttatcctctcagatatttctttgccagacggctgaacacagcaagagaccgttctatctgctcggttggaacacaataggagatgcgtacatgtccagggcaaccaaagctactacccggcactagaaggagatccatcttctgggctgctcgggcgaaagcaacatcatcctcatcaagactcttggggaagagatagaaagtgcctccgggtacgacacaggtgtagcctagattcctcaggctatgggtgaggatgcgagcgtttttctcatagacagagaggtcagccgttaggtcgcaacaggctggctgcagctccgcaagtaagatagagctcctcccctttgcaatctatcgcaaatcgacgggaaagagaagacgcaattcgcgttcggacttctgggtcacctgcggcgctggtgtaaccatggagaaggcagggctccatctcacggatgaggcgttcgatttccatcgatacctgagggggtggaggtacactggggtttccaatggagaagtcaaaaatattttcccggccaaccactttggctcgctgatttccatactcaaaaagttcccgtattactgatcgagtttgtcccaaagacaaggattcctgatttatcatcttgttttctccctattaaatgttgcttcttatgtcgcttcttctgttctgcttatgaacactttaaaagattcgcacatattatagttgacagaaaaaaattactaccacttaaccagttgttgcaccttctggtttgcctcttgtaaaacggcagcagacgcaagcaacgcctgatgttcctgatttgtcaggtgatactctaccaactctcgaataccagacccattcagaacagcgggaatacctaaatagaggtcggagagtccatattccccatgcggcatgacagacaggggcataacaatgttttcatcctgtatgatagccttgatcattcgtgctgcaacagcagcaataccataattagtagcgcctttctgttttacaatctgataagcaattttggcaatttcttttctaattgaatccaactccacataacgaaatctctctgggctatctcgcaggatatctataatacgctttgcgccgactgttacttggctccagggaatcatttgtgaatctccatgttctcccatgcacatggcctccaggctgcgggcatcaacaccaatcaggtcagccaaataataacgcaggcgtgcataatccaaggcggttcctgttcccataacctttgagtccggcagaccggagatacttttgaccagataggtcatagcgtccacaggatttgtgatgaccagaaagattccatgaaagccgctatccataactgctctggtgatggaagctacaacagtagcagcgttttccaacatgtccagccgagtcatgccctctgtataggggacgcccacagccaatacgacaatatctgcatcaatacagtccgaatatgttcctacactgatttggatattactatcgtaatatcccacagagtgattcaagtcggtgacttctgcccacgctttttctgcatttctgttgattagcactagattgttgcaggtgttgcagattacaagatgatgagccagagcagtacctacattgccagcaccgataatgacaactttgcttcttccaatagccataaaatcttcctaattcgaagatgtacagttgaatttcctgctttaatagtgtatcataggattgatgattaaggaaacaaatgatttttattattataattatattttttaattaagggagaaacatggatctaagattgttttccacatttctaagggtggcagaattgcagaattttacaaaagcggcggagcaactaggttattctcaggctactgtcacagttcagattcaccagctggagcaagcactggggatccagctttttgagcgaattgggaaacgagttcggatgaccgagcatggagaacagtttatcccctatgccatagagatattaaaggctgaacaaaacgcaaaagattttcttcgtgaaccagaaaatccttcaggacgtttacgaatcggtacggcggaatctcttctgctgagcgttcttacgcccattctgatggaataccaccatcgttatccggatgtaatggtcagcatccacacaggtttgattcatgaactgttcgatatggttcgacagaatgatgtggatcttttattctttctggacaagaaaacagattttgccgattgggtcaagttgctggaacagcaggaacccatcctatttgttgcttcccacgatcatatgatttgtcgcaagaaaaaagtatctttagcggaagtggtgcgcgaaccctttgtgctaacggaaaaaagtgtcagttaccgctatgatctggagcagcttctggcggaaaaaaagctggaaatacacccttttctggaaaccggtaacacggacatcctcgtcagaatactgcttcatggcaactgcttgtctttccttccgcaatatgtggttcgtccttatctcctatccgggaaaatgcaaaccgtagatgttgaggactgtcgtattcagatgtggagtcagctggtgtatcacaaaaacaaatgggttacaccccagatgaactgttttattacgctcatgaaagaaaaaatgggtaaagtaatataatgctttttatagctcttctcatttcagagaagagctatttttagtttgcgcgccatgggcgcgctctaacgggtgaaagtcccgaacacgcccagatagtgggaagtgtatagctgaacagaaagggtgtctatcgtgagatggaatctggaggaagctgtaagcaaatctctggtccgacggacagaaatcacatataaggctaggctatgagagataagttggctaaaagcaacgaagtctaataactatcacttttgtagtagcagagtaaatgtggcggatatatggagagaaagagcgtgcaccttaagcgtggaggtctcacagaggttccattagcctagtaacaacgaactgtgagaagtcagccgagcccatagtagtgaagaagtttctgtaatggaaatgaagcgaaggggcgaacaatcaataagtttgagtatgtctcgtattgcagaaatggcaacatctgccgtaaccaatcgggtaaaagatggtcaaatcaagcgagacggaaaggaaagaacgcatggacacaagtagtctaatggagcagattttatctagcgataatctcaacagagcatatctgcaagtcgtacgaaataaaggtgcagagggagtggacggaatgaagtacacggaactcaaagaacatcttgaaaagaacggcgaaatcatcaaggaacagttgaggacaagaaagtataaacctcaaccagtacgaagagtggagataccaaagcctgatggcggtgtcagaaacctaggagtaccaacagtaacagacagattcatacagcaagccattgcacaggtattaacaccaatctacgaggaacaattccatgaacatagttacggattcagaccgaatagatgtgcacagcaagcaatcctaacagcacttgacatgatgaatgatggtaacgattggattgtagacattgacttggaaaagttctttgacacggtaaaccatgacaagcttatgactatcataggcagaactataaaagatggagatgttatctctatcataagaaaatatcttgtcagcggaatcatgattgacgatgaatatgaggattctattgtgggaacaccgcaaggaggaaatctttcgccattattggcaaacatcatgctcaatgaacttgataaggaaatagaaaagcgagggcttaactttgtgcggtatgcagatgactgtattatcatggttggaagtgaaatgtctgcaaatcgggtaatgagaaacatatctcgatttattgaggagaaactaggtctcaaggtcaacatgacaaagagcaaagtagacagaccaagcggacttaaataccttgggtttgggttctactttgacacaagagcacatcagtttaaggcaaaaccacatgcaaaatcagtagcgaagtttaagaagagaatgaaagaactcacctgtcgtagctggggtgttagcaacagctataaagtggagaaacttaatcagctcataagaggttggataaactacttcaaaataggtagtatgaaaacactttgtcgagaattagatggtaacatcagatatagacttcgtatgtgcatttggaaacattggaaaactccacaaaacagagcaaagaaccttatgaagtttgatgtaccaagatgggcggcatttaaaatagcgtattgcggagatagatatgcaagactcgcccgcaatggatggatacaaaaggctataagtataaagagactaacctcatttggattagtctcaatgttagattactacaccgaaaggtgtgttacttgttaagttgattgaaccgccgtgtaccgaacggtacgcacggtggtgtgagaggtcgggaaatttagttaaatttccctcctactcgattgctcattttaaatttaccgcttgacattgtggcaaagatttggtagctttcggttgtctggtattctagtattaaaaatacttgctattccccaccaaaaaaaatcctttgaaaatcccatcaatatttgctataataacaaatgcacctgtgcatggtgcaaatatactataattagaaatcgaggaatgtaacatggcattattggaacagtggcagaaagttgcctataatgagaaagcagatagaggtgaattacagagattctggcagagatacttccttttagagaagggcgtatacgaacagcttttaacaaatcctgatgagaaagtagaaggaactgtaaaagagcttgcagagaagtacaacctcagtgttatggagatgacaggattcttagacggaatcaacgacagcttggttgaggctaatccaatcgacaccatggaagaagatacaaaagttaaccttgtttttgacaaagaaaaattatacaaaaacatggttgacgcaaaagcagactggttatatgaattaccacagtggaaagagatttttgatgatgagaagagaagaactttattcttagagcagaagaaatccggcactgttcatgtaggcaaaaaagttggacgtaacgatccatgcccatgcggaagcggtaagaagtacaaatactgttgcggaagatagtccgtcatatcggaattgtaaaaaatactttacagatagaagaaaagggtatagaatgaccctagtcaaaacgatgaagagaagagtagcataagcaaaagtcccagagaggaaggcgtttggtgtgagcgttctggcttggaattatgtgaagaccagctctgagtgaccccaatccggtccggtgataccgttacaatcaagaatgagatttctctggaatggacaggcagtaagaagattgatgtctggtaagacggagagatgaagatgggtggaaccacgataagcatatcgtccctgatattgtaggaatgcagtatcagggattttttatgttgtacagagaatcggagatacttcctacagaaacttatttttatatagcgaaaggaaatgaagaaaatggtagattttaaagcagacgaaagactgaatactttaaaccattcctgcgcacatgtgatggcacaggcagtaaaacacttatacccacaggcaaagttctgggtaggaccagttgtaaaagaaggtttctattatgatattgaccttggcgatgatatcatcaacgacgaagcaattgcagcaatcgagaaagagatgaagaaagtctgcaaagaaggcaagaagatttacagacgtgagatttccaaagcagaagcaatggaaatgttcaaagatgatccatacaaactggacttaattgaaggtctggaagatggaaacatttctgtttacgatcagggagatttcacggatctctgccgtggacctcacgtagacaatacaaagttatgcaagaacttcaaacttgtaaaatactctggtgtatattggaaaggtgatgcaaacaatcacgtaatgcagcgtatttacggtgtatgtttcccgacaccggaagagttagaggagcacttaaaacttcttgaggaagcaaaagaccgtgaccacagaaaaatcggtaaagagatgaatcttttcatgtcggatgaccttgttggacgtggacttccaatgttccttccaaaaggatacacggtatggcaggaacttgaaaactatatcaaagcaaaagagagaaagcttggatatcttcatgttatgacaccttgtgttggtactgtcaacctgtacaaaacatccggacactgggatcattacaaagataacatgttccctgcaatggaagtggaaggagaatccttcgttctccgcccaatgaactgcccgcatcatatgatgatttatgcaaacagaatgcactcttataaagatcttccaatccgtatcggtgagatcgcgcatgacttccgttttgaagccagcggtacattaaaaggtatcgagagaggacgtcatttttgccagaatgatgcgcatttattcgtaacaccggagcagatcgagtcagagttttcacaggttgtagatctgatctttgatacttacaaagattttaatatcacagattaccgttgtgtactctctttaagagatcctgctgataaagtaaaataccatgatgatgatgagatgtggaatacagctgaggacgctttgagaaaagtattggatgaccttggaatcgattacacagaggaaatcggtgaggctgcattctatggaccaaaacttgatgtaaatgtaaaaccggcgatcggaaatgaatatacactttccacctgccagcttgatttctgcttacctgcaaaattcaatctgacttacattgacaaagacggtacaaagaaaacaccggttgttttacacagagcaatccttggttcccttgaccgtttcatggcttacatcttagaggaaacaaaaggaaatctgccactctggttagcaccggttcaggcaagaatcattccggttaaaaatgaggatgaagagttgaatgcatactcacatgaacttctcagctatttggatgagaacggtatccgtgtggaaatcgacgagcgtgccgagaaactcggctaccgtgtaagagctgcacaggtagagaaagttccttacctcatcattcttggtaagaacgaagtaaaagacggaacagtaagctacagacttcatggcgaacaggctaccacaacggttccaaaagaagagttccttgcaatgttaaaggatgagatcgcaacaaagaagatcaatcctgccgcattaaaataaaaatgaaaaaaattaaaagaagggcatatgtcagaaaattatggcatatgcccttttgcatatttttttcaaaaatcgccatactaatctaagacaattgcgaaactcatgaaaatctaaattgaattgtaaaaaattaacaaaagacatgaaagacattggggaaccgccggttcttagaaggcaggtacaactgtaagttgtgcatggcttcttagtaccgttgcgagtgacacatagcgaaagcgtgtcttgaatgtttttgttaattttgaacaatttaagaagactatgacgagtttcgcaattgtctgacagatttgaatgaaaaggagcaaaaaagtatgacgtatttggattgttcagtaaaaggatgtagcttcaacaaccaggacggctgttgctgcaaaggcgatattcaggtggaaggacgcgaggcaacagaatccggcagcacctgctgcggcagcttcaaggagcgtggcagcaacggcgcagcatgtaacgcattaaaagatgtttccaaggaaatcgacgttgcatgtgaagcaacacattgccgtttcaatgaaaacgaaaaatgtcatgcagatcatatcggtatttccggtgccggagcatgtacgtgcggcgagacagagtgtgcaagctttgaatgtaactgcaagtacgagtaagtaaagtgaatatgtggtaaaatgaagtgcgcgtcctgtgcaaaataatttgcataaggcgcgtatttcagaagaaaagcgattgtacagacagtagctgagtacttttcggctcaggtacgtgtgtatatgaacacagaaattacacaaaaagtttacaaagagactcttgtttctttggtttcatagatgtagtatgagagttagaaaaacaaagagattcctttatggaggcggtacttatgagaaaaaaatcacatatttcactggcgcgttatatcgtaaataacatcgaagacaaagatttgaaaaaacataaattttctttttatataggaagtgttctgccggacatcaagccgtcctttctatataagagacatgagatagagggcacatatccggacatcagacgtcatatcgagcgtctttcagaaggaaagaagcttgtcgagaagaaaaaaggacgcaaatattacatggatttgggacagatcagccattatcttgcagattacttcacttatccccacaataagatttatccgggaagcttgaaggatcactgctcgtatgaggaaaagctgaaacgtgatctgagaaagtacatcaaaacagacgccgcaaagccgcacaagacagagcatgccgagtttaagaacgctaagaacctctgcgatttcatccagaaatcccatgatgactaccttgtgagaaaacatgatgtggaggatgacattcatcatatcgtggaagtgaactacaaagcactggaagccatgacacagttattagcggaaaaaagagccgaattccggatcaaacattcctgaaaaaacggaaaacatataaaaacgataggaatacactaaattaaaatattaattttttataaacagcgcaccaaaagtcgaaaaatggatgcgctgtttttgcaggaaacaggcacatgtggagagagaaaagaatttgtgtgtcgaattttggagaaaactcgtcagctatttcatttgatttttgaatctgcggatagtaatatggagaatataaaaaaggggaaagaacatttctccgctccggcaattagcagaaatatatatgtaaattgcattttccattgagaaaataaggaggattcatatgagaaagttgaatgaattacagcaggaaattgaatccgttcggttcgaactggatcaggcacttttacgtcaggataaatttgataactactatcaaaaaagtactaggcttgatagactgatcgaagagtatatcgaggaaacggagaaaaataagtagagaagaatggaaaataatgccaaatcagaaaaatactggtttggcattatttttttataccaaaatattgattttttcttaagaatagtctaatatatgtttaaaagtggtggaaagtggtagagaatggttcaaagtggtggcaaatgaccacagcaatggaaaatcaagaggaaccagctgccgcatgaaggcaggtgattgtgtcatgtttatgggagaatacaaccacacagttgatccaaagggcagactgatagttccagccaaattcagagagcagcttggcgatgaatttgtagtgacaaagggactggatggatgcttatttgtgtatacattagaagaatggcacaacattgaagaaaaattccggaacatttccatgacttccaaggatgcaagaaagttttcacgtttcttttttgcaggagcagcttcctgtgaactggacaagcagggaagaattcttctcccaccagttttgagagaatatgccaatcttaccaaagatgtcgttttagtcggagtcttaagcagagtggagatctgggacaaagacagatggcaggagaatacttacgatgaagatgagatggacgagatcgctgaacacatggcagatttaggattcagtatctaagttcataataataaagcagacagccgaagctaagggcaggcagagaggattgcaatggaattcaagcattattcagtattactaaatgagacaatcgaaaatttgaatatcaagcctgacggaatctatgtagacggaacccttggcggtggcggacatgcctatcaggtggcttcgcggttatcggaaaaaggaaggctgatcggaatcgatcaggatgcggacgcgatcgcagcagccggggaacggttgaaagaatttggggacaagatcacaatcatccgaagcaactatgccaatatgaaggaagaacttcatcggatcggcgtggagaaagtagatggtatcgtgttggatctcggggtatcctctttccagttggatacaccggaacgcggttttacttatcgtgatgagaacgctccacttgatatgagaatggatgacagacagagcctgacagcaaaagatatcgtgaatggatacagtgagatggatctttaccgcattatccgtgattatggcgaggacaagtttgcaaagaatatcgcaaagcatatcgtgcaggagcgtacaaagaaaccaatcgagacaaccggagaactgacagaggttataagggcttccattccgatgaaagtgcaggtgaccggcgggcatccggcaaaaagaacgtttcaggcaatccgtattgaactgaacaaagaattagaagtacttcagaataatttagacgatatgattgatcttttgaatccgggtggaagaatctgcattatcacattccattccttagaggatcgcattgtcaagacgaattttaaacgcaatgagaacccatgtacctgtccgagtgatttcccagtgtgcgtatgtggcaagaaatcaaaaggaaaggtagtcacaagaaaaccgatccttccttccgaggaagaattagaagtgaactcccgttccaagagcgcaaaattaagagtatttgaaagggtgtagcagatgccgaacagaacagcaaatcacaacaatcgaaatagagcataccaggtagagggcaacactgtacgccgcatggaggcaatgccggattaccgacaggagcgcagggacagacagcagagagagcgtgaggaagaattaagaaagcgcagacgtgctgcagccagaaatcaggaaaaagctcttagaatgagcaaaagttatgtggtatttctgaccatggcagtgacggtatttggcgttttctgcggagcatacatcaagcttcagtcggatgtgacagcacgcatgaagacgatcgcaagcttagagagccagatcacagacctgaaagcagataatgatgaggcttacaagcggatcaacacagcagtagatcttgatgcgatcaaggaaactgcgatcaatgatcttggaatgttttatgcgaccgaagatcagatcgtgtattactctgtagataagacagattatatgaatcagtacaacgaaattccacagtagtggtgaaatctaaatatttcgggtggtagaatggcaaaaagaaaaccgaagagaccgatgttaaagttcccgaagcgtatgcagaaaaaactcatcgttatgtttacggtggtagcagtgcttttagtcggactgatcggcagattaatgtatattgaatacaccagtggagaaaaatacgagaaaatcgttcttgcacagcagggatatgacagccagacaatcccttaccagcgaggcgatattgtagatgcaaaaggaactgtgttagcaaccagtatcgcagtctataacgtgatcttagactgctccgttttaaacgacgacgaaaaatatgtagaaccgacgatcaatgcacttgtaagctgtttcccggatctgacgagtgaacagcttcattcttatgtaaaggattcgccggacagccggtatattgtacttgcaaaacgtttatcctatgatacgatccagccttttgtgaatatgcaggaggaacgcgatgataagggaaaactggtcaatccttatattaagggcgtctggtttgaaaaagaataccagaggcagtatccgtatggtcagctcgcaagttccgtgatcggatttacaacatcaggaaatctcggaatcaatggacttgaaaattattataatgacacgttaaatggcgtgaatggaagacagtacggctatctgaattccgacagtaattttgaaaaaacgatcaaaccggcagagaacggaagcacgttggtgacaaccattgatgctacgatccagtcggtagtagagaagaaaatcgcagaatttaatgaaacatatcagaataattaccgtgagggtgaaggcggtgccagccatatcggagttctgatcatgaatccgaacaatggagatgtgcttgcaatggcacagtatccgaattatgatctgagtgatccgtggaatctgtcagcatactatacggaagaagaaattgatgcaatggatgatgatgcacgtttagatgcattaaaccagatctggcagaacttctgtctgacgtacacttatgagccgggttccactgcaaaaccatttacggttgcttccgggttagagacggggacgatcagcacaaatgatacttttttctgtgatggtgccgaacagctcagcggttttacagttaagtgtgttgcctacagaaaaggcggacacggcatgcagacgttggagcagacactgatgaattcctgcaacgatgccttgatgcagatgtcctaccgcatcggagcagaaaattttacaaagtatcagcagatttttggcttcggtcagaaaaccaatatcgaccttccgggtgaggcgagaacagattccctgatctatacgttagatgatatgtcgcagcttagtcttgcaaccaattctttcggacagaactacaatacgacaatgatccagcttggaacaggtttttgctcgatcattaacggaggaaaattataccagccaagagttgtgagcaagattaccgatgaaaatggcaatacaatcgaagaattttctccgacactgctccgtgagacgatatccaagacgaccagtgatacattgaaacaatacatgtattccactgttaccggcggtactggtaacacggcaaaagttgacggctattcgatgggcggtaaaactggtacagcacagaaagtaccaagagacggtatcaattatctggtttcatttattggttttgcaccggtagatgatccacagcttatgatttactgcgttgtggatgaaccgaatgatgtggaccagccacacagtacttttgcacagaacatcgtaagggagattttagaggaagtacttccttatatgaatatttatccggatgaggagacaaccggtttacattccggctgggatattaccggaaccgataccggagcagcggcagtgacagaccgcgttaccggaaatatggataatatcgcggaaccggagccggagggtacagatgatgtcccggatacgatggaagagattccgggagcagaagaaaataacgaggaaaacgccgagaatgacggcgtgaatgcagaagaagcaggaacaacctcagataacagtgaataaaaacataacctcataaaagttggaataaaatgcaaggaagacttttatgaggtttttgttttatgtaccggaataagacctttaaccggaaaaaagtaatgatcgtatttgtagcagtcttttttatcatgatgtttctgatcgggagactggtctatctgatgatattctgctctgaatattatggaaacaaggcggaaaatctccatgagagggaacgcgatatcaaggctgcgcgcggaaaacttctggatgtaaatggaaccgtgctcgcaacgaacaaatcggtgtgtacgatctcagtgatccacaatcagatcgaggaacctgaaaaagtcattgcgatgttaataaaagaacttggtatttcggaggaaaccgcaagaaagcgtgtggaaaaggtcagttccatagaacgtgtgaaaacaaatgtgccaaaagagaccggggatgcaatccgggcatatggactttccggcgtgaaagtggatgaagattacaagcggtattatccgtatggcacacttgcgtcgaaagttctaggcttcacgggagcagacaatcagggaatccttggactcgaggtaaagtatgatgaatatcttcagggaacaaacggaaagatcttaacgttaaccgatgcgcggggaattgagattgagaatgcaggggagagcagattagagccggtgaacggctatgatctctgcctgtcattagattacaacatccagatgtactgtgaacaggcagcaaaaaaagtctgcacgaaaaaatccgcagacagtgtttccgtgatcgtcatgaatccgcagaatggtgaacttatggcaatggtaaattatccggagtttgatctgaacgatccgttcactctgatgaatgacaatgcggcattgacagcagagaaaaaacaggaacttctgaataaaatgtggcgaaatcagtgcatcagtgatacttacgagccgggttccacctttaagatcataacggcagcggcagcgttagaggagggcgtggtaaagttagatgatgctttcttttgtccgggatataagatcgtggaggacagacgtatccgctgtgcgagaacaaccggacatggggcggagacatttgagacagggatcatgaattcctgcaacccggttttcatggaacttggcgaacggctgggcgcagagaattttgtccgttattttaagcagttcgggttactatccaaaacgaatatcgatctgccgggagaggcggcaacgattatgcataagacggaaaacatcggtccggtggaacttgccacgatctctttcgggcagtcgtttcagatcacaccgatacagcttgttacgaccgtttcttctattataaatggaggaacgcgtgtgacaccgcattttggagtgcgggtgcaggatgcggacggaaacagtgtgaaaactttttcctatgaaacccatgagaatatctgcacggatgaaacttctgagacaatgcgctatctgttggagaaggtcgtctcagagggaaccggtaaaaatgccaaaatagaaggtttttccattggaggaaagactgcgacgtcccagacactgccgcgaagcgagcacaaatatatctcatcttttctgggatttgcgccggcagaagatccgcaggtactcgtattagttgtgatcaacaatccgcagggaatctattatggtggtacgatcgcggctccggtggcaaaggaaatcttcgaaaacattttgccttaccttgataaatgagaggaaataacgtatactagttacgcgaattgaacgttagaaaaaatacaagaggtgtttagtcatgaattatgaaatagtgataccagttttgatttcttttgcaatcagtgcaattttaggaccggtcgtgattccgtttttaaaacggttaaaggttgggcagacggagcgtaaagagttggaatcccatttgaagaagaatggaacgccgacgatgggtggacttatgatacttgcaagtattatcattacctcccttttttatgtaaaagattatccgaagattattccaatcctttttatgacagtcggatttggcgtgatcggatttttggatgattatctgaaagtagtacttcgcagatcagacggactgcttccatggcagaagatgattttacagtttgttgtgactaccgtatttgctgtttatatggtacgttattctgcaatcgatcttacaatgctgatcccgttttccggtggaaaatatttaaacatcggatggcttgcgattccgttaatgtattttgccgtgatcggtacggtaaacggtgtgaactttacagacggagtggacggtctggtatcgagcgttactattatggtcgcaacatttttctcggttgtggcgatcggaacaaatgcagggatcgcaccaattacctgtgcggtggcaggagcgctgcttggtttcttattatttaacgtgtatccggcgagtgttttcatgggagacacaggttcgctggcgttgggcggattcgttgtggcaactgcctatatgattcagatgccgttatatattctgatcgtcggactgatttatctggcagaagtgatctctgttatggttcaggtcacctattttaaatacacgaagaaaaaaacaggtgttggaaaacgaattttcagaatggctccgttacatcatcatttcgaacttggcggctggtcagagacaagagttgttgcggtatttgcaattgtgacggcattgctttgcatgctcgcattattaggtttataaaaaggtcataaaaccgataagtgacctgctgttaaagggcaggagattggaaggataagacgatgaatttagaaggaaaaagagtgttagtagtaggttctggaaaaagcggagttgcagccgcagaactcttgaagaaaaaaggaatcacatttgtgctttttgacggcaacaaagatcttgatattacagcattgattgagaaaaatccggtatttgccggagcagaaatccttttgggggaactggcaccggaggatatggcgcgtatcgatcttgttgtgttaagtccgggtgtgccgacagatcttccgatggtgaatgaacttcgaaaccggcagattccgatctggggcgagatcgagcttgcttatcattttgcaaaaggcagaattatcgcaattaccggaacaaacggaaaaacaacaacaacttctcttgtgggcgagatcatggcaaattactttgcggatgtgaaagtagttggcaatatcggaatcccttatacttccgtagcggcagacacgacagatgatacggtgacagttgctgagatcagcagtttccagttagagacaacacatgagtttgcgccgcaggtgacagctattttgaacattacaccggatcatttgaaccgtcatcatacaatggaatgttatattgagacaaaggaaagtatcacaaagaaccagacagcggatgatacctgtgttttaaattatgaggatgaggtactccgcaggtttggagagacacttcacacaaaagtggtatatttcagcagcaggcggaagttagaaaagggactttatctcgccggagaggacattttttatgcagacggaaccgctgatacaaaagtgatcaatgtgaatgaactgaatattttaggaaaacacaattatgaaaatgtgatggcagccgtcggaatggcagtaagctttggtgttccaatggagaaaattgtggaagtactgaaacgttttcaggctgtggagcatagaattgagtatgtgacagaaaaacgcggcgtgaagttttacaatgattcgaagggaacgaacccggatgcagcaatccagggaatccgtgcaatgaaccgcccgacactgttaattggcggcggctatgataaacagtctgaatatgatgagtggatcgaaagctttgacggcaaagtgaaaaagctcgtgctgatcggtcagacaaaggaaaagattgcagaatgtgcaaaaaaacatggatttacagatgtagttttatgcgatacctttgaggaggcaatcgatacctgttatgcaaatgcagtaagaggagatgcagtgctgctttctcctgcatgtgcgagctggggcatgtttgcaaattatgaggaacgcggacgtatctttaaggaatatgtgcgtaatctggcagaatagaagcagtctgggcatatggcaggcagtgcgtagtaaagtaagaagtgaggaattggaatggcaagaggtcagcagacggaaaagaaaaaaaagccaattaaatatttcgattacagtcttttgtttctgatcatttttcttttgtgttttggattggtcatgttgtacagcaccagttcctatgccggctccaacaagttcggggatgccgcgtattttgtgaaaaagcagttatttgcaaccggacttggacttgtcggaatgtatattgtggcaaaaatcccgtatcgtttctggatgaaagtgagttccatggcgtatctggctgctattgtactttgtacagccgttattttcattggtacagaggcaaatggtcaggcgagatggctgaaaatcggaccattatcctttcagccgtcagagtttgccaagttcgcggtcattattttccttgctacggttatttacaagacaccacagaaaatggaagagttcatgagccttgtgaagataatggcaattgtgctcccaattgttgcggtggtagcttacaataacttaagtacagctattatcattttaggaatcgcggtctgtatgctttttgttgccagcccgaagtattcccatttcgttttaatggcagtggctgtcggcgttgtgggcgttatatttatcagctttgaggcataccgtatggaccgaatcaaaatctggctgaatccggaagcctatgagaaaggttaccagacattacagggactgtatgcgatcggatcaggcgggttgttcggaaaaggtctcggcgagagtatgcaaaagcttggttttatcccggaagcgcagaatgatatgattttctctgtcatctgcgaggaacttggactttttggcgcagtgtgtgtgatcctgctctttttattaatgatctggagatttatgatcattgccaataatgcgtcggacttatatggtgcgctgatcgtggtcggcattatggcacatctgtcgattcaggttattttaaatattgcggtagtaacgaatacgattccgaatacaggtatttcactgccgtttatcagttatggaggtacttcggtcttattccttctcgcggagatggggcttgcgctttctgtggcaaagggaatccgatttgaggttaattaaatatgataaaagaagaaagaagaagaaaaaagcgcagaaagatcgggttatacatttttctggttctgatcctgattatcgcagcctgtgtttttattgtcatgaatgtatttacagttgagaatgtagtcgtggaaggaaacgaactatacagctcaaaacagattgaaaatatggtgcttgatgatgaatattcctggaattccctctatgtagatctgaaataccgttttatagatattggggaagttccgtttgtggataccatggaagtgtctttggataatccgcatactgtacatataaaagtttatgaaaaaggtatgcttgggtatttatatattgattccataggtcagaatgcttattttgacaaggatggatttgttgtggagacatccacagagatcattgacggagtgccgaagattaccggggtttcctgtgacgaagtggtactctatgaaaaactgcaattagagaacagccagattttaagagatcttctgaatctgacacagaccttgaaaaaatatgatctgcttccggatgaaatccagtatgacagcagcatggagccggtgctttattatggcacaatccaggtgaaacttggttcggaggacaacctttcacagaaggtggttcggttatccattatcctgccacagttagacggtctcagcggtacgctgcatcttgagacatggacgccggagacgaccgatattatctgggacagagccgaagaagctcctgcggacgaaataacagaagaaacgacagaagaaccagcgcaggacgatccgagcagtgcggaaacgccagtggaacagccgcaggatgatcagggcagtgcggaaacgtcagtggagcaataaaaaccgtaaaaaaacttgattttttttgaaaaagcggttgatttgttgtaggaaaaattatattatagtttataagagttaaaaaacgcaaaatatagtatgattttgagagtagataactaaacaaagtagaaataagtttgtctggttatcatatttgacataaatttagggagatatgaaggaggaactaccttgctggaaattagaacaacagaagcagatgccagtgcaaaaattatcgtgatcggagttggaggagctggtaataatgctgtgaatagaatgatcgatgaaaatattggcggtgttgagtttgtcggtatcaacacagataagcaggcgttacagttatgtaaggcaccgacattgatccagatcggcgagaagctgacaaaaggacttggtgcaggagcacagccagaggttggtcagaaagccgcagaggagagcgcagaggaattatctgcagcagtaaaaggtgcagatatggtatttgttacctgtggtatgggtggtggaaccggtacaggtgcagcaccagttgttgctaagattgcaaaagagcagggaatcttaaccgtaggtgtagttacaaaaccttttaaattcgaagcaaaacagcgtatgttgaatgcgacaggcggtattgagcgcttaaaagagagcgttgatactctgatcgtaattccgaatgataaattattagagatcgtagacagacgtactacaatgccggatgcattgaagaaagcggatgaggtgttacagcaggcagtgcagggaattacagaccttattaatttaccggcattgatcaaccttgatttcgcagacgtatccactgtcatgaaggacaagggacttgcacatatcggtattggttctgcaaagggagacgataaggcaatcgaagctgtgaagttagcagttgccagcccattacttgagacaaccattaacggcgcaacacacgttatcattaatatttccggagatatctccttaatggatgcaaatgatgcagcaagctatgtacaggatcttgcaggggatgatgccaatatcatctttggtgcgaagtttgatgaatccatgacagatgaggcaacgatcactgtaattgcaacaggacttgagaatgcaggcgtagcaagcaagattgttccaaagatgcagtaccagaatatgggaactattccaagaccaaccgcacctgtaacaccaagaccggcagcacagaccggatatacagctccggtacagccgaatccggcaccagctttctctggcatccagaaaccacgccagccagaaagttctgtacagcagatggatattaagattccggatttccttaagaattccagaagataattacataggaacagaatgttaagactgttacatgaagatcataaggttttcgtgtaacggtctttttttattgcataggaaattacttcctatgcaataaaaaagctccgcgaggatgcggctgatgcgcagaagaattatgcaagctaaagcttgcgcgcatcagcgcgcaaagagttgcgaagcaactctttgttccgtatcacacacaggttttgtcggaaaaaccagatgaagttctgaaagtagaggaggcgttttgacaaaaaagccggttctaaaaaaatagaataggcttatggagaagaaaaggagggagtgatttttaatctatattttttatgcggatgtttatctgctgcagaacctgtggatggattttgttgcacttgcaggggcgaactgcctcctgcggcgaggaataaggggaagaaggattgtgtttacagcatgtttgtcatccataggaagcctgatcgtaacgcttggcgtcacagaggcatttttccgggcaatcctgatacattttctgttaaatacaggaatggttctgttttgctttggaaagcgtccgtggcgggagttcttagaaaactgggcagtcatttatctgatgaccattgtacttggcggagtaatggaagcattgagccgtagtggactggggcagacatttttctggatacaggcagtcattgcggcggctgttctttcaatcgtgacctggtatatggggcgtagaaaacagttcggcaatcagcttttttgtgtgctgctagagcaccgggggcgggtgatgaagagtaccggatactgggacagtggaaaccagttgagagatccgtacaatcacagaccagtctgcattttaagcagaagtgccgcaaaaaagattttaaatccgggaaaagacagaatacatttgattccgtattgttccttagggcagaaggaggggcttttgccggtggcagagattacatgcataaaaattcagaatggaagacacaaggttgagataagaccggcagaggttggaattgcaaatgaaggtctattggagggaaaagaatatgacatgattcttcatgcgtccatgctggggagtcaggaaagaggaatgaaacatgatcatgagacttgtactgccaagatatgaaaaggttcattttctgtcgggaatctgcagcctttttttgcgaaaagaagatgaagtgcactatatcggaggtgcggagattctgccaccgccattagagggggagcgggaagcctattgcatccggatgcttgagggggttcatgcggagcgggcgagaaaggagctgatcgaacacaacctgcggctggtcgtatacatagcaaaaaaatttgataatacaggtgtcggggtggaggatctgatctcgattggaacgatcggactgatcaaagggattaacacctttaatccggacaaaaatatcaaacttgccacttacgcatcccgctgtattgaaaatgagattttaatgtatttgaggagaaacagcaaaacaaagttggaagtttccattgatgaacctttgaatgtggactgggacggaaatgaacttttgctttccgatattctgggaacggatgaggatgttgtgggaaaagacatggagacggatgtggagcggaagcttttaaagacggcaattgaaaaactgtccggcagggagcggatgatcatcgaactgaggtttggattaaacacatctgacggagaggaaaaaacacagaaagaagtggcagatatgctcggaatttcccagtcgtacatttccagacttgagaaaaaaattatggggagattgaaaaaagaaattgtacgattcgagtaactggagtataattgtatcataaattaaaggagaagtcgaactatttacaaaagggggaagaaacgatgcagatagaatttctgggtgcagcgcatgaggtgacgggaagctgccactatgtaacatttggggataagcatgtattggtggattgcggtatggaacagggaccggatctgtacgtgaatcaggaggttccggtgaatgcagcggcaattgattatgtgtttgtgacacatgcacacatagatcattccggactgcttccgcttttatataaccatggtttccgcggacagatttttgcgacagaggcgacgacgcagctctgtaacatcatgttgaaggacagtgcacatatccagatgtttgaggcagagtggagaaaccggaaggcaaagagagccggaaaaccggaagtagtaccgatgtatgatatgaatgatgccatgggggtactcacacatttcattccatgtgcttataacagcgtgatagaagtctgtgaaggacttaaggtgcgttttgtggatgccggacacctgcttggatcttcaagcattgagatgtggatcaaagagggcgaagatgaagttaaggttgtattttccggagatattggaaatggcaaccgtccactcatcaaagatccgcagtatatcaaagatgccgattatgtcgtaatggaatccacttacggtgacaaacagcatgagacaccgccggactttgcagccgcacttgcaggggtattaaaggatacatttacaaggggcggcaatctggtgattccggcattttctgtcggaagaacacaggagatgctttactttatccgaaggatcaagaccgaacatctgcttccggagtttgagcattttgatgtgttcgtcgatagtccgctggcagtggaggcaacgacgatttttaataagaatgtggaggactgtttcagcgaggaagcactgaatctggtacatcagggaatcaatccgatcggttttccgggacttcgcatggcaatcacaagtgatgaatcgaagatgatcaattttgatgagaaaccaaaggtgatcatctcggcatccggtatgtgtgaggctggacgaatccggcaccatttaaaacacaacctctggagaaaagattccacgattttattcgttggttatcaggttccgggaacacttggaaattcactgttaaatggggcaaagcaggtaaaactgtttggtgagacgatcgaggtacacgcaaagatcgagaatcttccgggaatcagcggacacgcagaccggaacaatctgacaaagtggatcggagcctttgagacgccgccgaaaaaagtgtttattgttcatggggatgacaaggtaacagagaactttgcggcacatgtgcatgaggtatatgggtatgacacctatgcgccatacagcggcgacgcatttgatcttgtgaccggagagcagatcgcagccggaagcagggaactgatcgagaagaagaaaaacggagcttccaaagcttccagcaatgtatttgcaagacttctcgcagctggacagaggctgcttgaggtcatcaataagtgcgaaggtctgccgaataaggaacttgcaaaatttgcagatcaaatcaatgcattgtgtgacaagtgggtgagataattttataaggtaagatactggcggatggttttcaatgcagacttttccagacggctgacctgtgcctgggaaatatggatttcatccgccacttccatttgtgttttcccttcaaaaaagcgcaggttgataataaagttctcgcgctcggtgaggtggttcatagcgtcgcttaaagaaagcttttctacccagttttcctctttgttttttttgtcactgatctgatccatgacgtagagggtatcgccaccgtcggtgtagaccggatcatagaggctgaccgggctctggatcgcgtcgagcgcatataaaatatcttccgcggcaacaccggattcctctgcgatttcctgcaatgttggctccttaaaagaatttttggaaaggatttctttggcatggatcgctttgtaggcagtgtcgcgaagggaacggcttacgcggatgctgttattgtcgcgcaggtatcttcttacttccccgatgatcataggcacggcataagtggaaaattttacattcatggtcggatcaaagttgtcgatggacttgatcagtccgatacagccgatctgaaacaggtcatccatattttcatggttgccggaaaaacgtttgatgacacttagaacaaggcgcagatttcctttgatataggtttcgcgcgcttctaagtctccctgcttgatgcgggcaaacaatgcttctttttcggcttcttttaaaattgggagtttggcagtgttgacaccacagatttccactttatatgcaggcatgataatctcctttggtttgctaaaatgatgttattaatgaggatgtggcatttgagggaaaaatatacagaaagcaacttttttttgctggaaaaaaatgttatactatagttgatcctgcagtgaaaaagatactgcatcatcagggtttacgataattacgatgagaagacggtgtatatatgaaagatttaatagatgagaagaacaaacaggaaaaaatgaaaagaagtatcatcaaattctggaatgtttcctatggaaagccggaggcaattggtggggaagaggaagagagcgagcgggaacacacagacagtgtgtatgcagatactctttatgatgaggcagacgcgcagggcgaaaaacagacagacgctatgaatgaggatgaggtgtcacagacaaagatccagcagattttgcatgagaaggatgacagattacagagtctgatcgaacaggaacaaaaagagctttcctgacatatcgtaatagtaagaacagacgatggtgggatcgttttggttactctgaaaaaatatcacggtctggggaacgattatctgatctatgatccgaatcagaaccgcgaacagttacaggaacgacagatacaactgttatgcaggcgcaatatcggagtgggagcagacgggattctgttcggtccgctctttgagaatgaaaaaataaaagtacgcatttttaatccggatggaagtgaagctgagagaagcggtaacggcatccggattttttcaaagtatttaaaagataccggatacgtgaaagagaaacaatacgaactatggacgaaggcaggaccggtgcaggtggaatttttagacgaggatgcaacgtgcatgaaagtggatatgggctatgccgcttttggcgcagagagtatccacgcggtaggcattgagggggatatggtcaatgaatccgtattcttctgcgataatttttacaacattacgtgtgtgtctatgggaaatccaaactgtgtggtgatgatggaggagattagcaaaaataaggcgctgcatctaggtccttatgtggaaaattcgaaatatttcccggagcggatcaatatgcagctctgccatgtgatcgatcgtgagaatatacagattgaaatttacgagagaggcgcaggttacacgtatgcgtccggtacaggcgcctgtgcggcagcatcggcatcgcataaattaggactggtgggagaccgtgtgaacgtgcatatgcagggtggtgatctgctggtggaatttgcagaggatgaccgggtgtttatgacaggaccggtcgtgtatattggaagcattacgctggctgagaacttctttgcgtaaaaagtccttgcaaatgctgaaagaatatgatagtttataaatcgttgtgtgataagcacaacgattttttgcgtcagttcgaaaccttcctgacgaaaaacaaaactaaaggagaaaaacatatgagaaacaaaaaggtattatttcttacccaggctgcagtgattgcagcaatctacgtggtactgacgatttttatcagtgcatttaacttggcttccggtgccattcaggtacgaatttcagaagcactcaccattttaccattttttacaccggcagcgataccgggacttgcaatcggatgtctgctcagcaatctgcttacaggggcagcggtttatgatgttgtgttcggaagtctcgcaaccttacttggtgcggttggaacctatttactgcggaaacataaattcttatgcacgcttccgccagtgatcgcaaatatggtcattatcccgtttgtactgcgctatggatatggacttgcaatggaagtcggcggacatgatgtggcaatcccattctatatgctgaccgtaggggcaggagaagtcatctgctgctgtatccttggtacgatcttattgaatgcacttgcaaaagtaagaagtgtaatttttaaaaatgattgacgattttgcaaaaggcaagtaaactatatagttagcagtatctttcgaaatccagagaggtacgataaatggaaagttttacagaacatgaaaggaaaacgttatgaaaaaaatcttggatttgatcacagatgaagtgacaaaagcattcacagaatgcggatatgatgcaaaatatgcaaaggttactttatcgaacagacctgatctctgtgaataccagtgtaatggtgccatggcagcagccaaggaatacaaaaaagccccatttatgatcgcggacgaagtagtagaaaaacttgcagcaaaccctatttttgcaatggcagaatccgtaaagccgggcttcctcaatttgaagatcaatgcggcatatcttgcagattatgtggcaaaaatgcaggaggatgacggccgtttcggatgtgaagcaacaaaggatccaaagacgatcatgatcgactacggcggaccaaacgttgcaaagcctctccatgtaggacatctgcgttctgcaatcatcggtgagagtgtaaagcgtatcggtaaattcatgggacacaatgtgatcggtgatgtgcatttgggagactggggtcttcagatgggactgatcatcacagagttaaagttaagaagaccggagttagtttattttgatgattcttatgccggagaatatcctgcggaagctccttttacaatctcggaattagaggagatttatccgacagccagcaagaaatccaaagaggatgaggcatacaaggaagcagccatgcaggcaacttttgagcttcagcatggaaaacgcggttatcaggcattattaaaacatattttaaatgtgtctgtgacagacttaaagagaaactatgcgaacttaaatgtttccttcgaattatggaagggcgagtctgacgcacagccatatattccggatatggtccagaagatgaaggacgacggttttgcctacatcagtgacggcgcgttagtcgtagatgtcaaagaggataccgatacaaaagagatcccgccatgtatgatcttaaaatcagacggagcatccctttacaacacaacagaccttgcaacaatggtatggagaatgaaagattacaatccggatgagatcatctatgtggttgataaacgtcaggaactgtactttacacaggtgttccgctgtgcgagaaaaacaggtatcgtaaaaccggaaacagaactgaagtttttaggttttggtacgatgaacggtaaagacggaaaaccatttaagacccgtgagggcggcgttatgcgattagagcatctgatctccggaatcaatgaggagatgcttgcaaagatccaggagaaccagaagacaaaggagaaccttggaatcagtgccgaggaagcagaaaatactgccaaaatggtcgcactcgcagctatcaaatacggagatttgagcaatcaggcaagcaaagattatatctttgatatcgaccgtttcacttccttcgagggaaacacaggtccttatatcctgtatacgatcgttcgtatcaaatcaattttaaataaatatcatgccctcggaaaagacgagagcggcgcagtgatcgaggcagcacattccaagagcgaaaaggatctgatgttagaattatccaagttcaacgcagtcatggagaatgcatttgaggagacagcacctcataagatctgttcttatatctatgatcttgccaatgcattcaacagcttctatcatggaacaaagattatgtctgaggagaatgagacagtccagaaatcttacatccgtctgttagagcttacaaagtctgttttagagacctgcattgatgtattaggattctcagcacctgagagaatgtaatgcgtgtggtatgataagtaaatttaattatcgtatctaatagtcataaaataaaagacaagtcatagaattagtcatgggagaaaacaaactcccatggctttttttctttatggaaaacaatgtcctgtcagaaaaaaagattctgtcaggatgaaacagaaagtgaggtgccgccttgtgtgaaataaaattgttgtttccggtacatatgagagcattttttcaaaaggatgaatggcaggacgggttagaggagatccgggtgagagtcggacaaccaatcgagttttgttatggcagccgtaactgctatctgactggaagagaagaacaaatgttctgcaatgagcaggagtataagcaccgggaaaaagctttttatcgtgccacggaagcggatctgcgggaaatgttaaattacatttgtaattattcgctgtacgcttatcaggaggagatcaggcaggggtatatcacgatcgagggcggtcaccgggttggcgtggcagggcagacatgcactgcagacgggaaaatcgcagggatcagtccgatcacttttttaaatatccggatcgcgcatgaaaaaaaggactgcgcgaaaaaagtacttccgtggatacgccagaaagacagcatttataatacgctgatcttatccatgccgggagcaggaaagacgacgctgttgagggactgcatccgggaattgtcaaatggagaggcttatggagtgggactgaaagtgtgcgtggtggatgaacgatcggagattgcggcaagttatcatggggtgccgcagaatgatatgggaccgcggacagatgttttggacggctgtaataaagcggaggggatgcagcttttgatccgttccatgtcgccccagatcgtcgcggtggatgaacttggaaccgaggcggatttttatgctgtcgaacaggcattgaattgtggaagcagagtgcttggcacgattcatgcgggaaatatgaaggaattgtctgaaaagccacagctgaaacggtggatggagcgtaaacttttccagcgttttatctttttggaaaaagaggcagacggaagaagaatcatgcaggtatatgacgagcagatggagcggatatcatgttaaaagtgtttggaagcgttctgatcatttttgcaagtgccgggtttggattccaggtctgcatggatctgaaaaaacatttgcagatgctttatgatgtccggaaactctttcttgacattgcaaatgagatggcatattccatggagcctgtggaagtgatattgggacagtctgtacacagcagaaatccgtatctgaatgaattctgccacgagataggggaaggactgcaaaagaagaatcgggggaatggtcaggaactctggcaggagagactttgcgtgtggcagaaaaagttagggcttacgcaggaggaaaaagagatcgttgccggggcaggaagtgccttttttggaaagagcatgggagaaaatgagaaaagtctggaacattgtctggaacgattagactacgtgattgatgaagtgaggggggaacaaaaggaaaagcagaaagtctatcagaccgtcagcgtcatgtgcgggctgatcgtggtcattctgcttttgtaaaagctccgaaagctgtggaaaggcaggaactttatgagtgtaaatctgatttttaaaattgctgcggtgggcattttagtgaccgttttaagccaggtgttaaaacacagcggacgggaggaacatgcttttttgaccagtctggcgggacttattatcgtgttgttctggatcataccttatatatatgaattatttcagacaatggaatctttattcactctgtaaataggaaattgcgaaactctaattatgttatgagtttcacaatttccaaagtgtataaagtcagagggagaggaaaggcatggatattataaaagtagggattttgggtgtcgcagcagtgcttcttgcgattccactgcggaaagataagcaggaatacagcatgttcatcagcatggcggtctgcatctgcatttttatctacattattactaaggttgagatcgtgctggaattcatacagaaattagaaggactggttgccattgacactgcctatatcggtcttgtcatcaaaatggtgggaatcacctatgcggcagaatttgcagtgaatgtgtgcaaagatgccggctttggggcaattgcagggcagattgaaacttttgcaaagatgtcgatcttagtcgtgagccttccggtactgctggcattgatcgatacgatcgggagcctgatgtgaagatgaaaattcgaaaaataaactggcggtggctgcccatactggcaggaatcgttctgggacttctctttccgatgacagttcctgcggcagagacagacgattatctgcgtgaactgaatgcggaaatggactataaagaattggatacatttatggaggattatggcgtggaggaagtttcattttcagaccttgtaggagaactgatgcaggagggcgtgagcagtgcatggggagagaaagtgttttcctgtatcaaaacagcacttgcaggggagattacaaaaagccggcggcttttattggagattgtattgcttgcattttgtttttctattctgaaaaatttcgcaggtgcgtttcaggcttcctacatatcggatctttgttttctgctggtatattgtgtcatggtggttttgctgttacagtcctttctgctttttcaggagattgtgtcaaagtcgttagagagctgcgtggaatttatgaaagtcatggtgccgacgttttgccttagcatgatgtttgcatccaatactgccagtgcaatgggattttaccagaccgcgtttctggtgatctatctggtggaatggctgtttttaaacctgttactgccgatgatccacatttatgtgctaatggagattttggggcattttgtaccggaggagcggttttcgaatctgacggaacttttttttgaagtgatcagctggggaatcaagatcgcgggagtgcttgtattaggactgaatgtggtgcagaatctgatcggcccggcaaaggaccggatgcagcaggggatttttgcaaaaacagcagcggtacttccgggaatcggaagtgcggtcgggagtgtgacagaactgttgttgggggcaggaattgtggtaaaaagctgcgtgggggcagcaggactgatcgtacttattctgatcagcctgatccctttgctgaaagcactgtgccttgcctttttttacaagctggcagcggcagtgaccgagcctgtgacagataaaaggatctgcggatgcttaaagggaatggcaaacgggggaattttgtatgtgaaattattggggtactgcgtgctgttgttttttgtgacaatcgcgctgacagcggcggcgtccggatttatttattaagtaattgcgaaactcacaacctgaatttgaattttgcagttaactgggatttattgaggaagagagcatgaacggagtattttcttatctgaaaagttacatcattctttttctggtgcttacaattttgtatgaaatggtgccgaaagccggcatgcagaaatatatccgctttttttcccagatcgtattggtgtttgggctgctttatccggttttgggctggttcggagagagtgatgcatttttagagaaaatagaataccagtcttttttacaaaaaatagaggaggtacaactggatgcggagaagatcacctacatggataacgattattatgtgaaaaaatacgaaaacgcccttgcacttgatatgacacaaatggcgcaggaagaaaatctggcagtaaaggagattgaggtagaaatgacagaaaattatgagatcaaatgtattagaatgacgcttacaaatccggtaaaagaggggatcgtgatcggaaaagttgtactggatgaggaaaaaacaaaggaaacttccgaggatggcgcatacaaaaaattaaaagaaaagctggtgagttattatcaattatcggaagatcagttggatatcctgtatgaataaactgcgagaactcaaaaaaagtgactggatcgcaattgcgctgacgggtgtgctgattctgatcatcgcgataccgttatcgccgaagaaggaagaagaaactaaaacggcagaaaaggagatatctgagacggtttcggggaacggaggggaaagtcaggatgcatatgtggcttctctggagagaaaattaaagcaggtgttaggacagatggacggagccggaaaggttgaggtgatgatcacgctggcggattccggggaaacaatcgtagagaaagatcacaaggaacaggaaaatcacatagaggagagtgacacgggtggaggaacgcggtctacaacagagcgtgagacagagaatgtgacggtatatgtggaaaatggaagtgaaacctatccgtatgtgacaaaagaagtgctgcctaaagtggaaggcgtgcttgtcgtggcggagggaggagatgatccaaaagtaatttctgacatttccgatactgtaatggcattattccgtgtggaggcacataaaataaaagtagtgaagatgagtagttttcgggagtaaacaaggaggagtcacatgaagaaaatatttcgaaaaaatcaactggtgatcacagcactggcacttatgatcgctgtcgcagggtatttcagttatatgaataataatatggacgacggcgaacttcagacggcggcggaagcagcgaatacgcaggcagcagacggattggaagaggactatgatatttccgaagaagatatggtacagaatgagatttttacggcagaggaaccggatggaacggagacggcagcagcggacacacagagcagcgaacttgcagaggcggcagagacggatggagaggctgcagcggaagaaaccggggagacggtggctgaaggaacagccgggacccaaaatgttgtaaatcccggagaagcagtccttacaagcacaacggttgcaaatattgactatgcttctgagatgaaattaaaccgtgaacagatccgttctaaaaacaaggaaaccctgttggagatcgtgagcaacaatgcaatctcggatgagttaaagcaggatgcgatcaataaaatgatcgcaatgacggatattgcagagcgggaaaatgcagcggaaatgctgttggaagcaaaaggatttacagatgtagtggtaagcattaccgaagacagctgcgatgttgtcttaaatatgggagaggtcactgacgcaaagcgcgcacaggtagaggatattgtgaaacgtaagacgaatgtttccgcggaaaatgttatcattacgccaattgtagtaggtgaggcggatgcgaaatgattccgggataattccggcagactcattacaatttttccttgattttctttgattatcgttatatccttataaggcggcagtctgcaaagcaggctgcatggtgttacaatgagacatgacagcggtctctcggtattttaattcattattttttgagaaccgctgtgctttatatttggaggatatattttggctgatttaagaaaagaaatagaaaaaagacgtacatttgcgatcatttcccacccggatgcaggtaagactactctgacagagaagttcctgctttacggaggagctattaatctggcaggatcggtaaagggaaaagcgaccgcacgccatgcagtttccgactggatggagattgagaaggagagaggtatttccgttacttcctctgtattgcagtttaattatggtggatattgtatcaacattctggatactccgggacatcaggacttctcagaggatacttaccgtactttaatggcggcagattctgcagtcatggtcattgacggatcaaagggtgttgaggcgcagacgagaaaattatttaaggtctgtgttatgcgtcatatcccgatttttacttttatcaataaaatggaccgtgatgccaatgatacctttgatcttttagatgagatcgagaaagaacttggaatcgcaacctgtccgatcaactggccaattggttccggaaaaggatttaagggtgtttatgaccgcaacacgaaagaggttatgacattctcggatacgttaaagggaacaaaagagggaacggaaaagcacattcatattgatgacccggcgctggtggaagaaatcggtgaggctgcaaaagaaaagttattggaagaaatcgagcttcttgacggagcaagtgccgagtttgatatggagttagtgtcaaaaggtgagctgtctcctgtattttttggttctgcgttaacaaactttggtgttgagacctttttgcagcatttcctgcagatgacgtattctccgcttccaagaaaagcagatatcggagagatcgacccattccagaaagatttttctgcctttgtatttaaaattcaggcaaatatgaataaggcacaccgtgaccgtatcgcgtttatgcgtatctgttccggaaaattcgaggcgggcatggaagttacccatgttcagggcggcaataagaaaatcaaactttcccagccacagcagatgatggcacaggagcgtcatatcgtggatgaggcgtatgcaggagatattatcggcgtattcgatccgggcattttttccattggtgacaccttaactacggcgaaaccatttaagtttgagggaattccgactttcgcaccggagcattttgcaagagtgcgtcaggtggataccatgaaacgtaaacagttcatgaagggaatgcagcagatcgcgcaggaaggtgcgatccagatcttccaggaatataacatgggtatggaggaagtgatcgtcggcgttgtcggtgtgctgcagtttgatgttttaaaatatcgtctggaaaatgaatataacgtagagatccgcatggacaaccttccatatgaacatatccgctggattgaaaacgaggacatcaatatggacaagatcgttggaacttccgacatgaagaaaatccaggatctcaagggacgtccgttattactgttcgtcaactcctggagcgtcggcatggtacttgaccgaaacgaaggacttgtactatccgaatttggacgagagtagggaaggggcgaacaaaatggcagttgtaacaattacaaaagataattttgagacagaagtgctggcatgcaaaatcccggtcgtactcgatttctgggcagaatggtgcgaaccatgcaaaatgcagtctccggtcatagaagaacttgccgcagaactggatggaaaagtgaagttttgcaaggtgaatgtggacgaggaagcttcgctggcattaaattatcagatcatgagcatcccgacactggttgtgatgcactatggattatttcaggggaaagcagtcggagtgcagggaaaagatgcaatccgcgagatgctgataaaaattgaataatcatataacaatgtgtctgcgcatcggctgcacgctgtgtgcaggcacattaagttgctgtctgaacagtaaccacaatgcatttataacaaaaacatttcagacaaaaattcttgacaaacttatctatatcggttacagtcaatcttgcagataacagaatcttttttatcaaaaatgtaacagatcgtactatgagggcaaggtatcattaccggtaaaaacatttcagccggatcggcatggaatccagaaaagataaaacaacagaatgattcatgcattgcgcagacatgacagaagaaggaatgtgtgcaaaaaatgtttcatgttcatagttgacaattgaaggaaagtataatactataagaacaagaaaacgaacataagttcgtattggaggaaagaaaatggcaaaagaagataaattgaaagcattggatgctgcgatttcacagattgagaagcagtatggtaaaggatctattatgaagctgggtgacaattcagcacatatgaacgttgagactatcccgacaggttctttgagccttgatatagcacttggtcttggaggacttccgaagggaagaatcattgagatctatggaccggaatccagtggtaagacgactgttgcgctgcatgcggttgcagaggtgcagaagcgtggaggaatcgctggtttcattgatgcagagcatgcgcttgatccggcatatgccaagaatatcggtgttaacatcgacgaattatatatttcacagccggactgcggagagcaggcacttgagatcacagagacaatggttcgttccggagcagtggatattgtgatcgtggactctgttgcagcgcttgttccgaaggcagagatcgacggtgatatgggagattcccacgtgggacttcaggcaagacttatgagtcaggcacttcgtaaattgacagcagttatcagcaaatccaactgtattgttatttttatcaaccagctgcgtgaaaaagtaggaatcatgttcggaaatccggagacaactacaggtggtcgtgcgcttaagttctactcatctgtccgtatggatgtccgtaggatcgagtcgctgaaacaggcaggagaggttgtcggaaaccgtacccgtgtgaagatcgtaaagaataaagtagcacctccattcaaagaggcagaatttgatattatgtttggaaaaggtatttccaaagagggagatatcttagatcttgcgtcagactgcggtattatcgtgaagtctggtgcgtggtatgcttacaatggagacaagattggtcagggacgtgagaatgcgaaggcatatctgagagaaaatccactggtatgtgaagaagtagaggcaaaagtcagagcaaagttccagttagacggaacagcagaggaagctgatgctgtggaaaaaccggaagtattagagggtgaagaataagcatggatgtgcaggtgacatctgtgatccctttggaaaaaggaaaagccagaatccggtttgaggatggatcagaggtcattctttataaaggagagatccggaagcttggaatacaggaaggctgcgtgatcacggacgaggtctatcataagatcatagatgaaatcctaggacagcgtgcaatcaaaagagccatgcatctgttagaaaggcaggatcggacggaacgacagctttatgataaactgaaggagaacggatatccggaggtctgtattgaatctgctatttcctatgtgaaaagataccactacattgatgatttccgctatgcatctgcttatatccggtatcgtcaggagaagaaaagcagacagaagctgaaactcgaactgcaggcaaaaggaatcgcaagagatgtgatcgaggaagcgttagaggaagagtatgtttcagatgatcagaagaagatactggaattactgcagaagagacgctatagcttcgaaaatgcggataccgcggagcagcggaagaattaccagttcctgcttcgaagaggatttcaaagcagtgatatcctttatgtgatgcgtcaggaatggtagcggatctggcaaaaaagagacggtttgttccagagaaaatacgacaaatttgtacaatatgttgtattcttatttttgagacattcaatattatgcatattgaacagtaattcacttgacataactagaaaaatagaataaaattaatctgttgttaattatgacagaaaaattaatctaattatatgttatatgtacaatgaaaatttcataaaggaggtgctcctgtgctgcagatagtgatcgctgttgttataacacttattgttactgcggttctgacttactttatcacaactgcttaccacaagaacgtagcgaatgcgaagattggtaacgcggaagatagagcgcgtgagatcattgatgaagcagtaaaggcagcagaaaccaaaaagcgtgaagcaatgctcgaagcgaaagaagagtccattaaagtcaagaatgacctggacaaagaagtgaaagagcgcagagcagagattcagcgtagtgaacgcagagtcgtacagaaggaagaaaacttagacaagaagttagaatccattgagagacgcgaagccggttttgctgcaaaagaagaagaaatcaacaagcagaaagctcagattgcaaagctcaacgaagagcgtttacaggaactggaaagaatctctggattaacctccgaacaagcaaaggaatatctcttaaaaaccgttgaagaagatgttaaacttgataccgcaaaattaatcaaagaaatggaaaacaaggcaaaggaagaggctgataagaaagccaaggattatgtggtaacagctattcagaaatgtgcagctgaccatgtggcagagacaacaatttctgttgttcagcttccgaatgatgaaatgaaaggtagaatcatcggacgagaaggacgtaatattcgtacattagagacgatgactggtgtggatctgatcatagatgatacaccggaggcagttattttatccggatttgatcctatcagaagagaagttgcccgcattgctttggaaaaattgattgtagacggacgtattcatccggctagaatcgaagaaatggtagaaaaggcacaaaaagaagtcgagacaatgatccgtgaggaaggtgaagcagcaacattagaagttggtgttcacggaattcatccggaactcgttcgtttacttggtagaatgaagttcaggacaagttacggacagaatgcgttaaaacattctatcgaagtagcacagctttccggattattagcggcggaaattggtgtagatgtaagaactgcaaagcgtgcaggtcttttacatgatattggtaaatctgtggatcatgatatggaaggatctcatattcagattggtgttgatttgtgtagaaaatacaaagaatctccaattattatcaatgcagttgaggctcatcatggtgatgtagagcctgagtctttgattgcatgtattgtacaggctgctgatacgatcagtgcggcaagacctggtgcaagaagagagacacttgatacttataccaacagattaaaacagttagaagacatttcaaacggatttaagggagtagaaaaatcatttgctattcaggcaggtagagagattcgaattatggttgttccagaacagatcagtgatgcagatatggtattgttagcaagagatattgcaaaacagatcgagtctgaattggaatacccaggacagattaaagtaaatgtaattcgcgagtcacgtgttacggactttgcgaaatagcttgacaaagagagcataaaagaagattcgaagaggttgatcctgtttcggatcttcttttttatgtaacaggatatttcgttggaattccctgttgtataagaaacttcgttaggatgcgactgatgcgcagatacgaaataaaatgatgaatgtgagggaaaaagaatgagtgagcatacaaaaagaatcaaacgggaattaatgctgaaaggcacgattttagatatttataaggacacaatggaactcccaaacggcaagacagaggagtgggattttgtctcacacagaaagggagcggctgcggtagttgcagtgcgtgaggacggaaaactgttaatggtacggcaatacaggaacgctttagagcgtatgacgttagagattcctgctggggcaagagacagtgtgacagaggacacaaaagtatgtgcggcgcgggagttagaagaggagaccggatatcggagtgaaaatctttcttttctgatctcgttaagaactacggtcgcattttgtgatgagtttattgacgtctatctcgcaaaagatttgataaaaagtgaacagcatttagatgagggagaagcgattgatgtcgaggcacatgatgtcgatgaattgtgtgaaatgatttatgcaggaaaaattcaggattccaagacggtttcagcaatccttgcttataagaatctgctgaataaggagggcagagcgtaaaaactgattttaaatcccgacagagaaagcatagattattctggaaagcatagattattaggaagataaaattgtcctatgaagtctgaaaaatgaagcatacattttgtttcagacagaggaatggaatgtgagaaaaaatgattcggaaaagttttattctctatgcaatctgttttgtagccgggatcatacttgtgaatggcgttggcagtagtttactgcatacatatggaatgatctcattttgggatcaggcagcagttacattttggaatctgtcgtatgaccagtatttctggtatctctttttcgggcgtatgaaagggatgatcctgatactgctgcttggagtggtgttcgaccggagagtgctcacgaagatatgcatttcgttatttctgtttttaactgggatatttctcacaatgtcagtgctggagaggggcattgttgggattgtggctgtgcttttcgcaatgctgccacagtggattttctatctgatagctttggtgttttttgaaaagggacgggacagaaaagtgattttgctctgctttgtactggtgctgatcggatgcctgctggaaggatatatttctccatttttcctgaaaaaagtgttataacagcgaaaaacaccacaatcgtgtaatatgtctgtaaaaaaattgtaatgaataattacaagatatggtaaaaaaggatcagaaaaaacgagatattgtattttcgcaaaaagaccggaaaaatgggcaaaaatactgattgcattttaatttgtgagtcattataatagggaatatacctcgaaaaagaggtattttttcggcttgaaagagtttacattgagagaaaagaatcggggcaggtaatgagcatgaaacaggatatacataattttatccaatatcttcatcaggaaaaacaaacttcagagaatacagaattatcatatgaacgtgacttgaagaagatgagtctgtatttaacagagcatggagtgaaccgggtggatgctgttacccttgaggttctgaattcttatataatagagcaggagcagtccgggcttaagccggcaacggtctctagaagcattgcgtccatgaaagcgttctttcattatgaggagttagagcagaagatcagtgaagatcctgctttgaatctgaaagctccgaaggtagagaagaaagcaccgagtattttgacaacggaagaaacagatcgtctgttatcccagccgaaggaaaattcaccaaaaggtctgcgcgataaagcgatgttagaacttttgtatgcgacagggattcgtgtttcagaactgatctctttgaagctgacggatgtggatctgtctaccggatatattacttgtgtggatgcacataaggagcgtgtgattccaattacaccagtggctaaggacacgcttgtgcgatatatcagagagggacgtccgcagttagtgaaggatgagaattctgtctggttatttaccaattgtgcaggagaggcgatgagccgtcagggattctggaagctgatcaaatcttacggcaagagagcagggatagaatcagagatcacaccgcatatattgcgccattcatttgctgcacatctggtgtgcagcggagcagatttaaagatcgtgcaggagatattaggacattccgatatttccacgacacaggtttatgctcatatgaatcaggctgcaaatgcatagatttttatttatttaacagttttaagacgtcatctaaagaacatccgtgacttagggcgattgcctttaagtcttcaaattccggtttttcatgaattgcatgataaccggaacttttttttatgcggatttttccaaaagaagtatcatggacttcgaatgtggaagtgagttttgcacgctcataaactgcatagcggacaccacgagtggtagtgtgctggaagaaaaggcgtgtaaaggtttctttttccgacagcggacagagacaggtcaggataattcccggtctgccctttttcatctggatcggaattgtgtatacatccagtgcgccggcgtttaaaagagattcgctggcaaaactgatcgcttccccggtcatatcgtctaaattacaggagatacttaaaatcttatcgtcatagtcacctgtggcaacatctccaagaaatgcgcgcacacagttggcggtttcaaaatctttttgtcccatgccatatccggtctgttccaaagtcatgacaggcatttcctgaaaagcctcgacgtaatgacgcagaattgcagcaccggtcggagtgagcaattcgcctttgattgaaccggaataaaaagggagtccctttaaaagttcagtagttgccggagccggaacgggaagtacgccgtgagcacatctgacaaaaccgcttccggcatggagaggggaagacagtattttttccggtgcgatcaggtacataagaagtgcacagccacagacatctgccaatgcatccaaagtgccgacttcatgaaaatgaatctgttccaaagtggtattgtgaacagaagcctccgcattaccgatgagctgatagatagcggcggcatcggctttgacctgtgctggaagttctaagtgttcaatctgtgcgaggattgacgggtaactgtgatgtgcgtgctcatgatcctgttcagtgtgagtatggtggtgggtggcagcatcagaagaaacgacttcctccttaccgtttatggtgacgcgcatatgcgtgccggaaatcccacattttttggcttcttctggaaaaatctgaatcccatacccggaaaatgcctcattcatggtctgcaaaaaaatatctttctggtcacatatctcataaagggcagccatgagcatatctccggcagctcccattttacattcaaaatataatgttttcataaacaaaatcctttcttacaatctcacctttatattattagatttttttacgggatgcaagcagcttcattagtacatttccacaaaaaatggaaactgtttttgtgaaagtagtttcttgtaggctttacagggaagtgctacaataatggaaacggaaatgataaaaagagtttccaatgaaaaaatggaaacgataaagacaacagaaaccatgagaattgtggaagtatcgaaaagaaggaacgtttggcagaaaaaggagcagttatggaattacgggaatcaattttagagggaaccattcaggcatttaataaaaaagggttaaagttcacaatggacgatatcgcagccttacttggaatcagtaagaaaacgatttataccgtatttcaggataaaaattcgcttgtgtcagaaatggtagattactgctttgatttgatcaaggagagcgagcagaaagtacttgccgatacatccttagatacgatcggaaagatcagggcaatcttaggagttctccctgagagttaccgggacattgatttcaggcagctttatctgttaaaggacaagtacccgaagatttataaaaaagtggaacagaggttagagaccggctgggagacaacgatcgcactcattcagcagggaatccgagagggaacggttcgaccgattaaaataccgatcataaagaccatgttagaggcgacgatcgaacagtttttccagagagatgttctgatcacaaaccagatctcatataacgatgcactagaggaagtggtgaacatccttgtggacggaatcacacagacgaagtaagagagaaaaacgcagcaattttcataaaaaggaagaggatgagaaaatgtcggaacgtatttatttgaatgatgactggaaatttacggaacagtttgagatgaacctgacaacggcagattatgatgacagcgccatgcaggaggtaaggcttccgcatacgtgcagggaaacaccgctccattattttgacgaacactgttatcggatgataagcggttatcggagaatcattgaggcagagaaagcgtgggaagggaaaaagattttactgacgatcgatggcgcagcccatgacagcgaagtgtttttgaatgggaaaaaagtgggaggacaccattgtgggtacaccgcctttaccatggatatcagcagtgaacttttgtatggcgaaaaaaatatccttgtggtaaaggtgaacagcagggaagatttaaatatcccgccatttggttacgtgatcgactacatgacttatggcggaatttaccgggatgtctatctcgatatcaaaaacacagattacatcgaagatatttttatcaagacaaaaatttcggatgtgaaaaaaggaagtgcagagctgatctccgaggtggctgtttcaaggacgcaggagggattgttcttaaagcagagcctgaagaataaaaagacgggagagtttcagccgttgggggagagtgaaatctccggcagcacgatgcagctttcctacccggtcgagaatgtgatcctgtgggatctggaaaaaccggaactttatgaggtgaagacagagctgatctgtgacggaaagctgatggatgagagaattaaccgggttggctttcgcaaggcagaatttttaaaagacggattttatctgaatggtgaaaaaataaaactccgcggtctgaaccggcatcagagttatccatatgtcggatatgctatgccacgttccatgcagcggctggatgcggatattttaaagcgggagcttggtgtcaatgctgtgcggacttcccattatccgcagtcgcattactttatcgagcggtgcgatgagatcgggctccttgtttttacagagataccgggctggcagcatatcggtgatgcagcctggaaagatcaggcagtggaaaatgtaaaggacatggtaaaacagtaccgcaatcatacgtcgatcattctgtggggtgttcggatcaatgaatcgcaggatgatgatgaattttacaggcggacaaatgcggcagcacatgagctggatgattcaagaccgacaggcggtgtccgcgcgaacaggaaaagcagcctgttagaggatgtatacacctacaatgattttgtacatgacggaaaagcaaagggatgtgagccgaaaaagaatgtgacttcggatatggaaaaaccatatctgatcagtgaatttaacggacatatgtatccgacgaaagcatttgactgggaagaacaccgggtagagcatgcactccggcacgcaaatgttttaaatgctgtagcggaaaatgaggatattgccggatgctttggatggtgtatgttcgattacaatacacacaaagatttcggcagtggcgaccgtatctgttatcatggtgtgcttgatatgttccgcaatccgaaacttgcggcagtgatctatgcaagccagcaggagaaagagccggtgctggaactgagttcttcgatggatattggagagcatccgggatgtaaccgtggagaaacctatatttttacaaatgcagataaggtgcggatgtttaaaaatgaccggtttatcaaggaatacagtgcagcggattctccttataaatatttaaagcatggcccaatcctgatcgatgattttatcggggatgctttgaaagaggagcacatgaaaccggggcaggaagctggtgtgaaaaaagccttgaatgcatttgcaaggtttggatttgcaagacttccaaaatccatttacctgacaggcgcatggatgatcctgcggtatcacatgaatatggaagaagctgtgcggttatacaataagtatataggtgactggggtggtacatccacaacgtatcgttttgaggcagtcatggttgatccggcgaccgggcaggaacgcgtggtaaagacgatcatcaaagagccgatgacggagcgcaaactttccgttgttgcagatcatgaaaatctggtggaaaaagaaagctatgatgtggcggcagtccgaatccaggcgcaggacgaacacggaaacattcttccattttataatgatccactcacgtttgagacggaaggatcaatcgaggtgatcggaccaaagattgtttcgttgcagggcggaatgggaggcacctatgtaaagactaaaaaaatcgccgcaggggaaccacagaaggcggcgcttatcatacacgatggcgaaaacgaaattaaaatcggttttacggtacaaagggatgaaattgcaaaactcgaaaataactaaatgtgtactgaatggaagaatttaaagaaaatgaaatagaaagtttgttggaaagggaaaaaagatggcagacagatcaaaagtgatttttggcaatgagatgccggaaaaagtttacaaaaaagcattaaaatccaaaaagaaatacatgaaaaaattcggggatgattcaacaaaagattatccggtgactatcgaaaagaaccggtatatcggcgattccttaggcgtttataacattttagtcggcaatctcgcagaaaacgctcattatgatgcggatgcgcatgccgaaggcggcgaatttgatacggaaaaaggaatcattgtcggaaatatccgtatgggatttggccattaccgtatttccatggcaatggcatcggcagcgaaagcactcggatacacaccatactggatggacttaaattcttatggagagacgacctgtacgaaagtgattggggcgcagaacgatctttactcgctcggctcaagactttccaaaaatccgatttttaacaagttagtctgggagccaatgaactatgaagggttccgcgcgttatcctataatgcggcagatcagaaaaacgcagagttaatggcttcggtttaccgcaatgtgccaaaagacatcccggtgatcggaactcatgtctggcctgcgcaggctgccattcacgccggaatgaaatatgtggtcaatgcgatcccggataactggccaatggcattgcatttatccgagggaagcgtgcatacgatccagtgccataattcctatatgggataccggattttaaacggaatgaacaaggaaaaagtaaaccggccaatgccggcggacagccttgtatacacaggtcattacattgaccatgaacttgtgcagggaatcgaggcagactgtgcagcacgtatccggagaaaagaaaacggaaaaccaatgcgtttcctgttgactattggaggtgcaggagcacagaaggagatatttgcagcgattatcaaatacctgcttccatacattgagaaaaaacaggctgcattgtatgtcaatgtcggagattataaaaatgtatgggatgcactgattgcagagattcctgaaatgaaaaaatatgcgacagagcattttgataactggacagacaccgaagagtttgcaaaaaaagcactggatgaaaaagaggagatcgagggaatccatggtttctggcacaaaaatatttttgaggcagtctactgtaccaaccttcttatgagaagctgtgatgttcttgtgacaaagccgagtgaacttgcattttatccggttccaaagcttttcatccgccgtgtaggaaagcatgagatgtggggtgcaatccattccgcagaggtcggagacggaaccttggagtgccgtgatattccacatacgatccagatgctggaattattcttaaaggatgaccagtttttgatcgacatgtgccacaacattgagacaaataaggtggcaggactttatgacggagcctataaagttgtagaacttgcaatgggattaaagaataaataaaaagcaatggagaatataaaaaaggagatttttacaatggaagcaaagaataaattaaccggcaaagaacgatttgcctacggaatcggggctgtaggaaaggatatggtctatatgctttccgcaagttacatttcaatttattttctggatgttatggggatcagtgcggcagcaatcgcagtacttttaatggctgcgcgtgcatttgatgcatttaacgatccgatcatgggagtgctggtcgctaagacgaagaccagatggggaaaatttcgcccgtggttattagtcggtacgatcacaaatgcagtggtactttatctgatgttcaccattccaccggaattaaatggtgcaggcttggtagcatacgcatccgttacatacattttgtggggaatgacttataccatgatggatattccgttctggagcatggttccggcattcacagaggcaggaaaagagagagagggcttatctgcattcgcacgttcctgcgcaggtgttggttctgcactggtatccattgtcacagtcatgagcgttgcggctcttggaaaagcattcggcggaacaacagacaatgaaatcaaccggatcggatacagcaaatttgcattggtcattgcggttttattcgtcatctttatactgatcacctgcttatgcatcaaggaaaaatcaacggtcgacatgaaaagtgcaacgatcggagaaatgtttaaggcattgatccagaatgatcaggcaatgacagttgtagttgcaattgttatgatcaataccgctttatacatcacacagcagttagtttactttttcttaaaatacgatttcagcccaagcacctatcaggcagattttacatggtttaatatggtaggtggtggctgccagattttagccatgatgattctgttcccggtattgcgtaaattcatggatacgatcaaaattttctacacctgttttgcaatggctgtgaccggatacattctgatcatcattatctctgcaaccggaacaagctctgttgtatggttgttcattccggcagccctgatcatggcagcagttggtgtgttaaacgttatcattaccatatttttggcaaacaccgttgattatggtgaatacaaaaacaacagacgagatgaatctgtcatcttctccatgcagacatttgtagtaaaacttgcatccggaatcgcaggtttcttatcctccatggtactgtttgttttccatatcagttccaataaagaagccgtagtgaccgaaccaatcgcagccgcctcccgcatgggactccgcttatccatgacactcattccaattgtagtattatttattggattcatagtattcaaaaaacattacatcctgacggattcaaaactggctgaaatttcaggcgagttagagaaaaaacatcgggaaaaataatatgagataaattgcaaaattcataaataaagtaaagtgatttgtggaaaattgacaaaagcttgagaagacactggggagccgccggttcttagaagtcagattctgtatttcattctgatttatcagaaatgaaatgcaggagatgagttcttagtaccgttgcgtgcgacacgtagcggaagcgtgtcttcgaaaattttgttaatttttcacaatttgcataatctgaattagaattttgcaattatcgcgaataaggagaaaaatatgattcagatatcgaatgaaattttcgttttgcataccgcaaacacaacctatgcatttcgaaaattgccaaccggacaactcgaacacctttactatggaagaaaaatccatgtcagggaaccgcttgacgaaaatgcgatcactccattgatcgaaaaacataccttccagccgggcaacagttgtgtttatgataaagagcacgatacctatgcattagaggatctgtgtctggaaatgtcttcttatggaaaaggcgatatcagagaaccttttgtggaactggtgtatgaagacggaagcttttcctcggattttgtgtatgaatcctttgaacagttcgagagcagggaagcaagagagacagaggacgcacttccaacttcctatgatgaaaacaatgcggtggaacacctctgtatcgtgctgaaggacaacaattctgcactgaaactggagcttcattattttgtctatgaagactgtgatgtgatcacgagaagcgcaaagcttatcaatgaaggcgagagtgccgtgcagataaaacgtttattaagctgtcagatcgatttcccgacatccgattatgtgttcacttcgtttcacggagcatgggcgagggaaatgcgaaaatatgaggtgcctgtggcagccggaaagtatgtgaacgcatcttataccggaacatcctcaagcagggcaaatccatttgtgatgttaagcgaccgtgggacaactgaggatgccggagactgctatggttttaatcttgtatacagcggaaatcattatgaggctgtggaagtaaacggctatggaaaaacaagatttgtttctggaatcaatccacagaatttttgctggcagttaaagcaagaggaatgttttgagacgccggaagcagtgatgacctattccaaagacggttacaacggcatgagccagtgcatgcatcagtttgtgcgggaacatattgtgcgtggaacatggaagaaaaaagtgcgcccggttctgttaaacagctgggaagcagcatattttgacatcaatgagaaaaaactgctgcaactggcaaaagcaggaaaagaggcaggaatcgagctgtttgtcatggatgacggctggttcggacacagggataatgaccagtcctctctcggagactggaaagtaaacacgaaaaaacttcccaatggagtgtccggtctctgtaaaaaaatcaatgagcttggactttcgtttggaatctgggtagagccggaaatggtcaatgtagacagtgagctttatcaggcacatccggactgggcgatggatattccgggaaaaaatcattcggagggaagaaaccagaggctgttagatctgacacggacagaggtgcaggattatatcattgagcagatgagtaatcttttttcttctgcgaatattgcctatgtaaaatgggacatgaaccggatcgtgacagattattattcgaaagaacttccaccggaacgacagggagaagtggcacaccgctatgtgctcggtctttaccgctgtatgaaggagcttacagaaaggttcccagatattttattcgagggatgtgcggccggcggcaaccgttttgatcttggaatcttatcgtattttccacagatctgggcaagtgatgataccgatgcactgtgccgggcagaaatacagaccggatatagttacggatatccaatgtccgtggtaagcgcacacgtctcatcgtgcccgaaccaccagacactccgcgtaacaccgcttgagacaagatttcaggtggcagcgtttggtgtctgcggatatgagtctaacttctgtgatatgaaaaaagaggagttagaggcagtaaaagcgcagatcgcactttataaagagtggagagaagtgctgcagactggttttttttaccggggaagaaatttctctgacgagggaagtaccagtggcagtgtgttaggagcgtctgctggcaatatacaggaatggacctgtgtatcaaaagaccagaaaaaagcagtcggattcctgatgcaaaagctggtgtcgccgaatacgcagtttgaagcttatcatgccaaaggattaaatccggaagcagaataccatttttacaaccgtagtttaaaatacaatgttaaggaattcggggatctgatcaatacagtagcgccggttcatatcaggcaggattcccttgcgcacaatctgatcgctatggtgaaaaaaatggatggtgagcaggaagatttctgcgcatatggtgacacgttaatgtatgccggagtgaagttgaaacaggcatttggcggcaccgggtataatgaacaggtcagacatttcccggattttgcctcccggatgtacttcatggaacaggtagaatagcaggaaagcagtcgaggggcaaagaaaagatcagtctgccagtcttttctttgcctcgtcgatgacatcctgcacaaaaccgtctgtatcattgcgcactgttttccagtcaatgtgttccatatcaggtgaatcaaggtctgcattgcggaaaatatccggcaaagacattttcttagtgattgttccgacaaaggaaaaattgccaagcagttcttcgccctgattgacggaaagattttttatattgatcttgcagcctgtgtcatcaggttcagcagtgatataaccgcttgcggtaaaatcgtccccctgatttgtctcatagagacagtccatataaagaaaattcacatgcgtaacggacggattgcggacataggtaagcgtcatgcgctcatcatccggcaactcatagcttagaatacaggtgctgacgtcggttccgtcaatgaccatagaagccccctccgtgatatcggaaaggtcaacttccatacggctcatctggcagagatcggtcagatagagtgaaacgcggatgtcataatcaggagtttccattcctaaaagttcccagataaaaccaccacagcctttcggaattgtaacgaggtattcgtgactttttttcccggcagaatcggtgtgtacctttccggtttcgtcaatctggatctgtcttgtcaactcaataatattcgaaaaattatcatgaaaccattcctgatcaatatcgtgggtaaactccggtgcttttttgaaataggtattatttgtggtcatggcgtaagataagttatctaacattggcaccataaaataaaacgtatttgcgttcatataaaaatccatttctcccacattcagtgtcagaacatccatatcggaaatgatcgaaagctttttttgttcaaaagaccgttctccggaaatattcatagaagaagagtaattaaaatttttaatgtcattcatataagcctttccctcaaaagaaatatttccattgaagtaatcctggcataattccataatatcaatgtgataagcaatataggcgggatcgtttaaggtatgctgcataaaatagacaaccgataaaagcatttttgtgcgcggatgattggaaacataggtaaaactgccaagagcaagcagaagaagacatacaagcagtatgccgaatttacgaaatcgttttttctttttgcggtttggggttgtgctggtctgctccataaatggtactcctgttgtggttggttggcatgtgatatgtgtgctcacttttgccttacgtacattatgcgttactgtgcactcgttcctcgttccagtaacgattcgcagacccatttaaagttttgcttcgcaaaaggagtctgctcacacatgaatcatgttcttacgtacctgagcagtaaaatgctcaggtactgtttgaacaataactattatacagttaatttctcaaattaactaggaaaaaataggatgaattctcaaaggttttcgtgtacaataagtgaggatgagaaaagatatacatccagcaggagaaatgaacatgacaaatgaattttgcaagggcggtggctgcacagcgaagcttggtcccggcattttagacaaagtattaaaaatgataccgaaaaaagcagatccaaacctgttagtgggcttcgatcattcggatgatgcagcggtgtaccagctcacggatgatcttgcagtggtgcagacgctcgatttttttccaccaatggtggaagatccttatctgtttggaaaaatcgcggcggcaaatgcattgagtgatatctacgcaatgggcggagaagttaaaacggcattaaacattgtatgttttccggaaagtatggacgccaacgttttagggcagatcctgctcggtggaaacgaaaaagtcacagaggcaggcggtgtgttagccggaggtcattccattaatgacacagatgtgaagtatggattgtccgtaatgggaaccattcacccgaaaaaaattctggaaaataatcattgcagggaaggtgactgtctgattttgacaaaaccgttaggcgttggaatcgttatgacagcgtcgcgcatgaaggcagcgtcaaaggaagcgtttgaccaggcagtggagtccatgacaacgttaaataaatacgcagcggagattttgaagcattatgaggtgcatgcatgcacagatatcacaggatttggactgttagttcatttaggggagatgttgggtgaagctttttctgcagagattaagacaacacagattccgtatatcaaagcctgtgaggattatgtggaggaattttacattacagcggcagggcagagaaaccgcaatcatatcggtgcacaggcagcatttgatcattgcagttttgccatggaagaaattctatttgatccgcagacatcaggcggacttttggtggcagttccggaacatgaggcagaacaggcacttacggagatcaaagcacttggacttgactgtggaatcatcggaaaagtagtccggaaaaaagaaaagaaaatctatgtcacaggtgaaatgtgacaagcgaaaacaaaattttttacaaaaaatatatagcatggaggataaaaggaatgaaaattcagattgatgcaaaaggaaaacagtgcccattaccggtaattgaggcaaaaaatgcaatgcagggcatgacggaagcaggaaccgtggaagtggcagttgacaatgagattgcagtgcagaacctgacaaaaatggcaaatcacaaaggattgacagcaacgagcgagaaaaaaaccgagcaggaatacacagtctggatcgaagtgacagaggactttgtgaaaaataatacaagcgataacaaagacgcacaggcagaggaagcagaagaaatatgtatcccggataccagaaagaaaaagacggttgttgtacttggcgcagaccatatgggcgaaggagatgaaaaactcggaaaaacgctgatgaaaggatttatctatgcgctgacacagttagacgaactgccgcagacagtgttacttttcaattcgggggcatatttaagcagtgagggatcagattctgttgaggatttaaagagccttgaagcccagggcgttgaggtcataacctgtggaacctgtctgaaccattatggactgaccgaaaaattagcagttggttctgtcacaaacatgtatgtgatcgcacagacgatgatggaagcagaacatatcataaaaccatagaaagagcttaatcagtatgaagaaaaatttgatccttgtccgtggcggcggtgacattgccacgggcacgatttacaaattacatcagagcgggtatgccgtgcttgtgcttgaaattgaatatccttcggcaatcaggcgctatgttgcattttcagaggctgtttatgaaggaacttacacaattgaaggtgtcacctgtaaaaaggtggatacattagaggaagcatacgaagtgatcgcacagggaatgatcccgcttatggttgatgcgaacggtgaagtcatccgggaagcaaaaccggcggcggtggtcgatgcaatccttgccaagaaaaatcttggaacgaaccttgctatggcaccgtttaccgttgcattaggtccgggatttacggctggatatgatgtgaatgtggttgtggagacaatgcgcggacataagcttggcagaatcattcaggaaggaactgcaattccgaataccggagttccgggtgctatcgcaggagtgacaaaggagcgcgtcattcattctgaggcagaaggctatctgtatggaacaaaaaaaattgcagattatgtaaaaaagggcgagatcattgcctatatttacaaagaaaaacagccggacggcacgatagacgaaagtgcagaagataccaaacagaatgttacagaacagaaaatcccggtttatgcttcgatttcgggaatcctgcgtggactgatccgggacggctatccggtgacgaagggatttaaaatcgcagatatcgatccgagagaatccgagtatgagaactgttttacaatttctgataaggcaagatgcattgcaggcggcgtgttagaggcactgctttctgcagggattcttccggaaaggcaggaaacttgtaatgatttattttgataatgctgcaacgactctgcagaaaccagaagtggttgcgcaggcagtaaaagaatcattttcttatattggaaatgcaggaagaggggcaaatgatgcttctctttttacatccagactcatttttcagacgagaaaacagatcgcagagttgtttcacatgaaagacggggagaaaaatcttgctgcggagcgtgttatcttcacgatgaacgcaacagaaagtctgaacatcgttataaagggattattgcagagaggcgatcatgtgatcacaactgcaatggagcataatagtgttttgcgcccactttatgagatcgagcagcagggagtggaattgactattctttcctgcgaagaaaaaggaacggtatcctatgaaaaaatggaggctgcgatcagaaacaacacaaaagccattgtgtgcacgcatgcttctaatgtaacaggaaacggcaatgatatagctgaaataggtgctttatgcaaaaaatataatctatattttattttagacgcatcgcagacggcgggaaatatcgatattgatatggaacagaatcatattacggcacttgtgtttaccggacataagggactttatggaccgcagggaacaggtggaattgcattggcagacggtgtgtgtgtgcatccacttttatccgggggaagcggagttcattcttttgataaaaaacatccggaagaactgccgactgctttagaagccggaacattaaacgggcacggaatcgcaggactccatgccgccttacaatggagcaaagagacaggtattgagaaaatccatgcaaaagaaatggcgcttgcaaaacagtttcaaagagggatagagaccattcccggaatccgtctttatggcgaagaagaaaagacagcggcgatcatagcctgcaatcttgcagattttgactcgtcttatgtcagtgactgtcttgcacaggactatgggatcgccacaagggcaggcgctcattgtgcaccgcttatgcatacttattttggaaccgtggaacagggcatggtgcggtttagtttttcctattttaacacggaagaagaagtagcagaggcggtaaaagccatgaaagagatcgcggcggagaaccggggaagagtgaccgcttacgttggcgcaggtggaaagacgacaagcattatggaacgggcagaaaagctgcgtgcggaggggaaaaaggtactgattctcacaaccacaaaaatgatgatacctgagaaaaaggatatatttgctgcatatacagaaaatgaaaagtacacagagaatctaaaagaaattgaaaactcggaaaaaacggcaaatcgttgcaaaatagcggaaagagcatttaaaaagcaggtgcagaaaattttagagcagcatggatactgcatagccggaaagccactttccggcacagaaaaatttggaatgttgccggaactgctcatggaagatctgttatacatggcagacgagatattagttgaagcagacggatcagcgcatatgccgatcaaggctccggcagagtgggagccggttctttttccttattttgacgaggtggtcgttgtcatgggagcgcatgcaattggaaaaccaatcaaagaagtctgccacagattagaatatgcgaaaaagatactgcattgcagcgacgataaaatcgtgacaaaagaggaacttcaaattttgcgcgaagaagggtataaaaaaccaatcagcgagaaatatccggatatgaaaattttataaaagcttcttgacattagaactttaatacgataaactagcaaacaagtgaagaagaaaaatcgatgagcaaagagagtacttgataggatgctttacagagagtcagcggctggtggaaagctgataagatactatataaggaatgggtttgtgagagcaaagcgaaacagcagaatggttgtagtagcggatgccgtgtcctcacgttacagaggtatgatataggaattgcaggcagtcagattaggcggcaggcagtttaaagtatcggaatgagatgagacatgattggtggcggattttccaagagattggaaagtccgtttttttattgcatagcaactctttgttcttacataggaaatttgacatgtttcatgaagaagggtggcaccacgaggaaaaatcgtccctgaccagagtaaaagctttggtcagggacttttttaaaggcattgattctccggtgtatggtttgcagtttcatccggaatctatctatacagaacatggaaaacgcatgattgagaattttctgtcacaataaaatagaaaattacgaaactctaattcaggttgtgaagattgtgagaaattaacaaaattttcgaagacacactttcgttacgtgtcgctcgcagcggtactaagaaaccaacgcttgcatttctatctgataaatcagaacgaaatacaaccgctgttttctaagaaccggtggctccccagtgtcttctcaagcttttgtcaattttttacaatttaatctatgatatctatgagtttcgtaattgccaatcaaaataagaaagagaaaggcgaaaatatgatactggatcagattgttgaagataaaaagaaacgtcttgttgagcacaagaacaaagtgagtgaaactgaaatccgggcgcaggcagaacaacgtgagagtacttcacatggtttttatgatgccttgaaaaaagaacagatttccattatcggggaatttaaaaatgcatccacaggtctcgaaaaaattaaaagtaaaattaatttagaagaaagaatcaaagaatacaatagttctgtggatgcaatttcctgtctgacggaagaagatcacttccatggaaatatcgattatctgaaatacatccgcagtatttcaacacttccgattttgagaaaagattttatgatcgatgaataccagttttatgaggcgagggcgatcggggttgatgcagtgctgctcattgcagctatattagacgatgcacagatgaaagctttttatcagcttgcaaaagaactttctctagacagtctggtggaagtgcacaatgaggaagaaatggaacgggcgctgaagttagatgcagagatcattggtgtgaataaccggaatcttaaggattttaccattgaattagatacgacaaggcggctgttggcaatggttccaaaggataaggtttttgtggcggaaagcggcattatcacagatgaggatgtgaagttcttaaagcagtgcagagtagatgcttttttgatcggaagggcactcatggaagccgaacatcctgccgaggttgccgcacactggaaggagctggcatgacaaaagtaaaaatatgtgggatccaacccccggtggaagcagaatatctcaaccgcaatgaggtagattatgcaggaattgtactatatgaaaaaagtaaacgttacgttccaatcaataaaacaaaaaaaatactagaaaaattaaatcaaaacataacaaaagtagccgtagcagtgtcgccggaggagaaaatgatgcacaaggttttaagagccggatttgatgtgttacagattcatggtgactatgacagaaagatattagagcataagccggatgaattgaaactctggcgggctgtcaatatccggaaaccagaagaacttgcattttttgactgggaggaagcgaaggcatttgatgcgatccttctggacgcagaaaattatgggagcggtcagacttttggctgggacagtgaagacgccggacgacagataaagcaaactatgacacaggcagaaagtacaaaaagccagatagagatgttgcaaaagtttcgggaaagattaaaagcgcacggcatcttatttgtattggcaggaggtctttgtgcggacaatgtaagagagggaatccaaatctttgagccggacatcgtggacgtgagcagtggcgtggaacatgagcatggcaaggatgaagaaaaaatcaggatatttataaagaaaacaaaaagttaattgtaaatttaataaaaactagcatgtataatttaaaagttgacatgtagatagcaaaagttattgtttgtagactatgagaaaggaaggatgatcgaaatgaacacgaaagcatattatggagaatttggcggacagtatgtagcagaatctttgatgaacacattagaggaattagatgctgcatttgaggaggcaatccgtgatccggaatttttaaagcagtatcattattatttgaaacagtatgtcggaagggagacaccgctttattacgcagagcggctcagtcaggcatatggaacgaagatttatttaaagagagaggacttaaaccacacaggtgcacacaagatcaataatgtgatcggtcagatccttcttgcacagcgcatgggaaaaaagaaagtgatcgcagagaccggagcaggacagcatggtgtggcaacggcaaccggagcagcgttattcgatatggagtgtacggtttatatgggtgaggaggatatcaagcgccaggcattgaacgtgatgcgaatgaaaatgcttggggcaaatgtggtgagcgtccgttccggaagcaacaccttaaaagatgcgacaaacgaggcaatccgtacctgggcaaaaacagcagaggacaccttttacattatcggctctgcggtaggtccatatccttatccgaaaatggtaaaagagttccagagtgtcatcagccgtgaggcaaaaaaacagttttatgaagtggagaacagacttccggatgcagttatggcatgtgttggcggtggctcgaattcaatcggaatgtttgcagattttatcgaggaaaaaggcgtgaaactgatcggtgtcgaggctgccggaaagggaatcgagaccggtgaacatgcttcggcaatggcgcttggcgagccgggcgtgctgcatggaatgcgatcttacttattacaggatgaaaatggaaatgtaaaacttgcacattccatttccgcaggactggattatccgggagtgggaccggagcatgcttaccttcgtgacacaaaacgtgcagagtatgtttccgtgacagatacagaggcaatggatgcgttaatggaactgtgtgaacttgagggaatcattccggcaatcgagagtgcccatgccattgcctatgcaaaaaaatacgcaaaagggctgcaggaagcactcggaaaagaaaaagcaatggagaaaagcctgatcgtatgcctgtctggtcgtggagataaggatgtaaatacgatcgcagattatctggacggcaaaggctacctgaattagaaaggataccgaatgtaaaacagaaataatcgaagaaagagaaaggaagaaagtaatgaatcgaatcgaagaaaaactgacaatgttaaaagaaaaaaatcaaaaagcgtttattacatacacaacggctggtctgccggacttagaaggaacgaaaaaactgatccgggcacaggaggaagccggagttgacctgatagaacttggcgttccattttcagatccggtcgcagatggtccggtcattcagaacgcatcctatcaggcaatctgcaagggcgtgacattaaaaaaagtgtttcatacagtggaacagatgcgggcagaaggaatccagattccaatcattttcatgatgtattacaatacggtgctccattatggcgtgaaagatttcgtaaaaaaatgtaatgaagccggtgtggatggtctgatcattccggatcttccgtatgaagaacaggacgagatcaatgaatatctgaatcagtccgatgcaacgattttaatccagcttgtatccccggtttccggaaaacgtatcccgaaaattttagagcatgcaaggggatttgtatattgtgtatcttccatgggagtgaccggacaggcagcatccttccataaagaagtcatttcttatctgacacaggtaaaacaggtgtcaaaaattccggtaatgatgggatttggtatccgggaagcacaggatgtcgctccaatgaaagacatcattgatggtgcaatcgtgggttctcattttattactttattggaggaaaacaacttcatcaccatagcagcagccaactattgtaataaatttaaacaggatttaaataatctgtaaaacaaagaatgtgaggaaaatgatatgaatatgaaagaagcaattgcaaaagcaacagacagaattgaccgaggacaaagcagagacgatttccccggaggtggcaaagcacggcaaccgctccatttcttcaaaatccggagcaggagatgtattagaggcacttggagtaaatatcatggcagaacctgcgcttgtgaaaaagtgtgtggatcaggttggaattggatttatgtttgcacagcttttcaataaatccatgaaatatgttggtcaggcacgaaaagaaatgggaattcgtactgtgtttaacatcttaggaccacttgcaaatccgtcccgtgcgaaaaacatggtagtcggagtttacagtccggcacttacagaacagattgcgaaggcaatggcaagactaggggtagagcgggcatttgttgtatccggagaagatcatatggatgagatcactttaacaggagcaaccacgatctctgaaataaaaaatggagaggtcgcaacctttacggtcacaccggaggaattcggactaaaaagctgtagcctttcagaattgcagggcggcgatggcatggaaaatgcaaaaatcacaaaggcagtcctgacgggtgaagaaaaaggtgcaaaacgtgatatcgttcttttgaatgccggagcaattctttatgtaggaggggttgcgcaatctatcgccgagggtgtaaaattagtggcagagaccattgattcaggggctgcttaccgcaaattggaggagcttgtcgctgcatccaatggataatagaagaacagcgaggagacaacaatgattcgatttaacagtgattacacagaaggatgccacccggcgattttagaaaagctcgcagagacgaacatggaacagacggcaggatatggcgaggatgaatattgtgagcaggcgagagcactcatccggaaagcctgtggagatgaaagtgtggatgtgcattttcttgtgggaggcacacagacgaatgttactgtgatttcagcagcattaaagcattatcagggagtaatcacagcaaaaacagggcatattaacattcatgagacaggagcgttagaagcctgtggtcacaaatgcctgtgtatcgagacaccggatggaaagctgaccgcagaacagattgcagcatacacagacgcacattttgcggatgagagttttgaacatatggtacagccgaaaatggtatacatttccaatccgacagagatcggaaccatatataaaaaagcagaactggaagccatttatcaggtgtgcagagagcgtgggctttatctgtttatggatggagcaagattaggttatggactgatgtgcaaggaaaacgatctgacgctttccgatattactgccaacacagatgtattttatattggtggaacgaaagtgggagcactttttggagaggcagttgtcatccgcaatgaggaattaaagaaggatttccgttacaatatcaagcagcgcggtggtatgcttgcaaaaggaagactgcttggaatccagttcctgactctgtttgaagaaaaccgttattttgaaatatccgcacatgcagcgggattgtcagaaaaattaaaagatgaattaacaaaaatgggcgtgaaattctatattgattcgcctaccaaccagcagttcccaattttgccggatacggtcttagaggaactgaaaaagaaatacagcttcgcttatcaggaacgcatggacgaaacacacagtgcggttcgtttttgtacctgctgggcaacgaaagaggaaaatgttgatcttctgctttccgatatttccagactgcttaaataaatgaaggagacattcaacatggcagacagaaaaaatattttgctgattgcgaccggcggcacaattgcatccaaaaaatcagacagcggtttaaaaccacagattacgccggaagaactgatgcagtacattccacaggtaagtgagatctgcgagtttcatgcaatccagcttttaaaccttgacagttccaacatggagccgaaacactggaaaatgatggtgcacacgatccgtgaaaattacgacaggtatgacggatttgtgattgcacacggcacagatacaatggcatatactgcggcagcactttcctatatgatacaaaattcacgtaagccgatcgtcattaccggggcgcagaaaccgatcgaccttgagattacggatgcaaaatcaaatctgatcgacagttttttgtatgcggcagatgaaaaatcgcagggcgtccagattgtttttgacgggaaggtgattgcgggaacgagagcaaaaaaagtccggtcaaaaagttacaacgcattttccagcattgattttccgtatctggcagtcatccaggatggaaatattatgcgttatattccaccggtgccttacgaagatgaggttttcttttatgagaatctggatgaaaatgtttatctgatcaaaatgattcccgggatcaagccaagaatcctgcgcagcgtatttgaaaactatgactgtatcattgtggagagttttggtgtgggcggtatcccgaaatcaatctcggatgatttttacaagctttgtcaggaatttccagatcgtctggtcgtgatgtcaacgcaggtggcgcatgagggcagtgatatgaccgtttatgaggtcggacatgatatgaaaaaatattgccgttttctggaatcctatgatatgacgttggaatctgtgatcgcaaaggtgatgtggatgcttggcaaccgggaggcattaggtggcgatttagaagacatcttttatcaaaatgtgaattatgatgtcatttttgggaaaaacaggaagtaaccttgaaaaaataggattccaagtaacaaaaaagtaaaggattacttatttagatgaaaatttggattggattagaatacaaaaggatattgatgaagattgccaaatttctcagaacagaattaaacaaattttgataagatttgaataagaattaaaatagtagatcaagcaggaacattgtgtatggatgaagacaagtcaaatgaagaaaacgttaagagtaataaagagacacatatttgggtagatgcagatgcctgtccggtagtccgcattgttgagaagattgcagaaaaatatacaattccggtgactctgctttgtgatacgaaccatatgctacagtcagattatagtgaagtgattgtggttggagccggtgctgatgcagtcgattataagctgatcagtatttgccacaagggagatattgttgtatcacaggattatggtgtggctgcaatggcacttggaaaaggtgcttacgcaatccatcagtcaggaaaatggcacacaaatgacaatatagacaggatgcttatggaacggcatctgaataggaaagtccgaagggcatctgggaagaatcatataaaaggaccaaagaaacggacaccagaagatgatgaacatttcagcgagtcatttgaaaagatgatacgcatggcaattcagaacagaggaggagaaaacaatggcaaagaatgaaagatttgaaaaaacatattcacagggaacaatgaatgtgacagaaatttgggtagataaggaaacaggagtaaattatctttatcatgtagcaggatattcaggaggattgacaccgcttttagacagagatggcaaaccggttatttctccgattgtaaatggataatggaagtgaagtctgatgacgaaggaagaatggtataaacagctctttgaacatctcgaagcctcgaaattcaggagcagttttcatttgaagcaaaaggatattgattacatcaatgaaaaaggattggatgtgatacgacagcacgcacaggattttatagcaaagcgtgaagcaccggcagttattccgaatgatggaaagcagacaccaacaaagggacatccggtattcattgcgtagcatgcaacggcaacctgttgtcgtgagtgtataaggaaatggcataagatgcagccaggcagggaattgagtcaggtgcagcaggattacttggtggatgtaattatgacatggattgagaaagagcttgccagagcaaaggagaactgatttgaatatacagatatttggaacaaagaaatgtaatgatacgaaaaaagctgaacgattttttaaggagcgtggcatcaagtatcagtttattgatatgaaagaaaagggtatgagcaagggcgaatttaattctgttgctcaggttaatggcggtcaggataatatgatcaactgggatggcaaagacaaggatcttcttgctcttatcaagtatattgcggatgaagacaagctggataaagtgctggagaatccacaggtaatcaaaacaccggtagtaaggaatggaaagcagtcaacactgggatatcagccggatgtatggaaaggatggaactaacaatatatgaagacagcaattatttatgcatcagtgcatcatggaaatacaaagaaaattattgatgaaattgccaagacaaatgaagttgatctgatagatgctacacaggtaacagaacaagatttatctggctatgacctgataggatttgcgtcaggagtatattacggaaaatttcatcagtctgtacttaaatttgcatctgtcaatctgatagagaataaaaacatttttctgatgtgtacttatggtggaagtgaggcattcaaatctatggaaaccattattgaggacaagcatgataatctggtgggaaggttttcgtgcaagggctttgatacatttggaccatttaagctgattggcggtgttgccaaaggacatccggatgatagggatcttacagcggcagttgagttttataagaaactgattgcaggtggtgtggtgaacgagtaaagcgtaaaacgaaggaggtgccatatgccatttaagattgcccgaaatgatattacaaaagtaaaggcggatggacattatgcgtctgcggactggatgatgaaaaaattataagataacaaaaacggaacagatcaaagaaaccataaagttatcgccataggcacggtaattatgctatactgtgcctatgcaaatcaaaatggatttgtaaactggattttatggaggcaaaagatggaaaaagaatgtttgcatgaaattagaaatatgaaaaatgcagttgtattcagcagtaaaacagggaatacaaagaaattagctgatgagattcgtaatgtccttccggaagaaacaataaaatattttggttctccagagacagcacctttggatgcagattgttattatgttggattttggacggacaagggatattgtaacgctgagataggaacttttttgaaaaaaatcaaagacaaaaaagtatttttgtttggtacagccgggtttggaggggattcggaatactttgataagattctgaaaaaggtagaaaacaatcttaatcacagtaacattttgtgtggcagttatatgtgtcaggggaaaatgccaaattccgtgagagagcgttatatgaaaatgaagaatagtccactgccagttccgaatattgatgctatgatagaaaattttgacagggcagtttcacatccggatgaacaggatttagagcagctcaggcaggtcatcgcttcgtctcaaaaataagatataatgagcgcaagagaggaaaatacaaatttatttgtatttgacgaacggcgaagtgattgagtgatgaaatcacgatataatgagtgcaagcgagaggaacacatgcctggctttcaggtttgcatacataagccatctggactgacaatccagatggctatttttttacgactgatatcttcaatgttgggaataagtgagcgaaaaggctggaatgtgcgggagcatttagctaatgatcctccataaattgttgtccccatttgcacatagagtccaataaaggaatcagtgttttgcctaactcgcttaagttgtattctgttttgggaggaattataggatatatttttttgatgattaagttatcactttcaagctcgcgtaactgttgggcaagcattttgtctgtgatagctgggatttttttccgaatctggttataccgtaatgtgtcgttgccaaggtgatacaagattacggctttatatttgcctccaattttagagattgttgcgtcaacaggacaattatattcattttgcattttatatttcacactttctttttggttagtatattacaaaaaagtacgttcttgtcttttttatatcaattccattataatcaaactgtctagacaaaacaatcataattttaaggagatttgatagaaatgagtattttagatattgcaaaacagcgtttttcagcaagaaattatctgaataaagaaatttcacaggaaacattggagacaatttttgaagcagctcatgtagcaccaaccgcagcaaatatgcagcctgtcaaactattggttgtaaaaagcaatgaagcaaaagaaaaactggcaaagtcagccaacatttataatgcgccagttgcaatcatcgtgtgtgcagatacgaataaagcatggacgcgcccatttgatgggatgaaaacaatggatatagatgcatcaatcattaccgatcatatgatgcttacagctacagagcttggcttgggttccgtttggatttgttactttaaaccagatgtgataaaagaggaatttcatcttccgttgggacttgaaccaatcaatatattggcgcttggatatacggaggagaaagcagatgcaaatagacacgaatcccagcgtataccaatgaaggagtttatttcatttctttaatagtgcagacatgactaaaagacagggcagtgaaccaataatggtttactgctcttttcactttataggaaatttct

SEQ ID NO: 14387 - DNA, 886 bp, Unknown
  gut microbiota DNA sequence
gtgccgcagcttgtcatttaaccttctatatcccatatctggatgtttttcatgtaatcgttccagcttctctgccaattcctcgttaaatcgctcatttggtgtctctgcatgatggagccatttgtagtaggatgacctggagatccctcctatttcacataataacaggattggatagttatattttttgtgttccttcttgattgcccgatagatatgttcctggcgtatcaggctcagcctcccctcctctctatctcttctaatttttttaagaaagatatctctatttctgcccgtcttttttccgcacgcagaagtcttacttctgcccgcagtttttctacttccgtcatttcctctggagattttctctttccccgcttatcctgcagcccatccaccccgttttcttcatatcttatagtataacttctggcctgctgataagaaatgtgaaatttttttgctgtttccgaatagttatgagaatgttttatgcaatattgaacgatttcaacacgttcttcaaatgtagtttttcttcctttagtcatgatcggtcttcctcctgtttccttatcatgactattatacttcataatccatcttctgagtatctgtgcatctgaaattttgtgccgggcacagatatcccggagagaaccttttccagaaaggtaatcgaaaacagcggcttctttttgggcaggagttcgataggtatgcccttttcgaaaaaaagcttccggtccaattgctttataatttctaagccatttatcaacggtcgtataataaactcctatttttgacgcaacagaactgatagattctttcttctgaagaatttttttcatccattgtattttttcttctggag

SEQ ID NO: 14388 - DNA, 903 bp, Unknown
  gut microbiota DNA sequence
gctacagaatccttacaatgaaatagaataaaaaacaaaggagagtttagagttatgattcaacagagaaacattgcagtatgtattattttatccatcgttacatgtggtatttacggtatttattggtttatcgttctttctaatgataccaatacagtatccaatgcggagaatgccacatccggaggagttgcttttgttttaagtctgattacctgtaacatttatggtttatactgggcttacaaacagggagagaagatcgacaaggcaaaaactgacagaggcatcccatcaagtaatagcggagttatatatttaattttatgcttggttggattaggaattgttgcagaagcattaatgcagaatgaattgaatagccttgcataagggttagaaaaataataaatccctgatagtctggcagaaggtcagattgtcagggattttattatgccgtttgttggaagttcagggagcgtatgcgtgaacaggcgtaaaatataaatgccaaagacaacgataccgagcagacacgtgataaacgtcagataaggaggctttttttcgaacatatatttataaacccaaagataaagaaagtatggaatcagaagaaagatgcaggggttcatctgaaaagcagttgaaaaatgggctgtgagaaaactgatcccagcccgcgtgagaccacaggcaggacatggaaagccaaataaaatagcaattggacagacagagtgaaagagatattgagtaacgctcatgtatataataatacaaaggattgcaatgcgattatggtatagattggataaaaaatttttaattccttttaaaatgaacatatgatctccaaaatataaaaaacgatagacaaattataagtagtaatct

SEQ ID NO: 14389 - DNA, 2122 bp, Unknown
  gut microbiota DNA sequence
tgtgaaccgtatccaagcattaccgtgtctgcaaataatatacacaggcaggattcattcttaaagtacgatcactgcagcatcaagcccctcaacttttccatcaaacggctcatctctaagcagattatattttccctcatactcactaaagttccttgcattactgctgcaattaaaaatcaaggcaattgtctcttcgacatttttcctgatcaggacaattgtttcttcctcatcctttgtaattgaccctatcagttcgccttctgaaatgcacgcatgtttttttcgaatccaaagcagctgtttataccattcatacatctctttgtcctgatattcttcatcccagtacatgccccgcctgcaatccggatcatttgcccccggcatcgcaaactcatctccataataaatcataggcattcccggcaataacagctgaaaagccgctgccaaatgctgttttttcttattgccattacagagatgtaaaaatcttgctgtatcatggctgtcaatcagattccacataaggggataacattttttatttaaacgacccttcagatatcccagattctgtacaaactgactgacgtgaatcttttcatctgccagcagatcgatcatattcagataaaacggatagttcatgaccgtatcccattcatctccctcaagaaaatctcctgcataatgccagatttctccaatgatcagcatatccttttttacagccttgaccgctcttctaaaattcttccagaaataatgactgatctcgtctcccacatccatccgccatccgtcaatatcacattccttaatccaatagcacgcaacatccgtaaagaatttctcaacttccggatttttcagatttagcttaggcattcctccatagtagccaaaacatttgtagtttggaatctctcctctttcactttcaagtggaaatttctcaatataataccaatccagatattttgatttttctcccttttccatgatatcctcaaatgcaaaaaattctcttcctgtatggttgaacactgcatccatgacgattttcattccacgtttatgagcttcctgcaccagttccctgagatcctctgtcgttccaaatgaaggatcgatctgataataatcgatgatatcgtacttatgacttgaatatgatttgaagataggtgtcatatacaaaacatcgattcccagattctgaacgtgatccagatgttcaataattcctctgagatcaccatgcagatcatccatagacgaaattggtgctttataccattgttccttatctacctgctgtgatgctgcaaaacgggcaggaaaaatctgatacacgaccttatttgcagcccagtccggcacctcaaacatttcctcttcccgaagagtctgcgggcaatcaaacattctgtccctgtttgtgatgcattccttataaaactcataattgccgtaatatattttttcaccatgcatgtccgtaaattcaaaataatatctgagacatatcagatgcatctgaagctgtgcttcataataatcatgaaactgtgaagtggcaatcttcttcatcagaatggtctttttcgtatccttgcgttccattggtatatacttatcttcacagtgaaggataatctccttcatgtcatcttttttaacctgcacacgtatcacaaacagatccttatcaattgcgtaacagaatcttttgtccatgtcatgataaattgctgaatattccataatattttccctttacatattctttccattcaaatattctctgctgctaatgcaccatgtccgcttccattcgtatctactacttctgaatgtactacttttaccaatgtatcgtaatacattacttttcaaggcaatgcggatcgagaagaaaatcgtaaatattgattgtaagaattccatattcatcgtaatgcggctgaacaatatctttggtaataacgattttcttgaaagagtcgtcaatccttctaaacggtctgatttcctgaatgtgctttgtttcatctggcagcgagtatgccgactggatatagtatctgaccgaacccatattacaaac

SEQ ID NO: 14390 - DNA, 643 bp, Unknown
  gut microbiota DNA sequence
gtcacctttgatctttttaaaatattcacggatgttcttctcatatccattttcactcggaatataaaatttcctgtctgtcagtccatccggcaaatattgctggtttacataatgattaggataatcatgtgcatatttatatccaacaccatgtcccagttttccggaagacttgtaatgtgcatcctgtaaatgaaccggaatcggtgctgtcttcgtattcttcactacttccattgcatcaaaaatcgcatttaccgctgaattgctctttggtgcacttgccacataagttgctgcctgcgataaaatgatctgtgcctccggcataccgatccgctcaattgcctgtgctgcggaagttgccacaactaatgccataggatctgcattgctcacatcctctgctgcgcagatcataattcgtctcgcgataaacttaatatcttcccctgcataaagcattctggcaagatagtaaactgctgcatccggatcagagccacgcatacttttgataaaagcagagatcgtatcataatgattatctcctgttttatcataacgaaccacgcgtttctggatacattcgcttgcaacctcaagtgtgatatggatttttccatcctgactccgttca

SEQ ID NO: 14391 - DNA, 424 bp, Unknown
  gut microbiota DNA sequence
atcgcatttttctgcgccatttcatctgtataatcgtgcagaaaataagtggtaactccaccatagcccggttcaacctgtgttacaagtgcattcacgccatagtctgtaataaagccctcgccattttcatccagtccgatcgtgacttccgccatgccaccgaccatgcggtcagcgatcccatctccactactcgaagtccagtttacataattcccgagcgaatagtaaacgagtgtctggtttccggttgcctcatctgtcacccactcaacaggctcgatcacatgaggatgcgttcctatcaccagatcaacgccatttctgacaaaaatctctgtccattttttctgcatgctgtctggctgcaaactgtattctgttccccaatgtgggcacactacaacaaaatctgcctgtt

SEQ ID NO: 14392 - DNA, 1120 bp, Unknown
  gut microbiota DNA sequence
attacggatgaattggcggcattaatctcagaagtaagaaaacagcgttcaacattagcagtttgtccatcagcaaaagaaaatgtatgtgtgacggatattttatatgaaattatagaaaaagagatttataaaaaagattatgaggaaataacattaggcttgctatttgtgccagaaacctacgatacagttattcaaagcataaaaaagattgcagatagtggaatctggaattagaataaatggcggattttacaccgccactttttctattcaatcttcacaaactccggtttcctctcacggaaaaccgtaaagtaatcaaagccggcgtcttttaatatagaaggaacttttgcaaaatcaaatgcaacatgttccggtttgtgggcgtcggcaccgatcgtgatgatatcgccgccaagttcgcggtaacgccggatgatctcctcagttggatttgggtggccaagaccgtacttgaagccgccggtgttcagctcgatcccttttccgagggagacaagttttcgtaaaatctcatcgatcacatcctgatattctctccagtcataattttcattggaagtcggaccgtagcggacaacatagtcgaggtgtccgtatacgtcgaaatcatggtaactctctatattttcaagaatcgattcaaaatattcgcggtaggctgccttttcctcacgtccttcgtaataggctgcgtagtacggatcaaatccatgtacaacatgcgaggaacctatgacaaaatcgaatggatactgcgataaaatatctgcgtgcagcgcagctaaatgcggctgtaaaccaagctcaatgccaaggcggatcggaagccttgcggcatatttttcctgataggcaagtacggaggaagtataattaggcagatccagaagaaagatattcggttcttccggataatcaatatcaagatgatctgtaaagcagatcccggcaagtcctttttcgatagcagtagcaatcatttcctcctgcggggcttcactgtccccggaaaactggctgtgcatgtgtgtgtcccagagccggtaatgcgaaaatttggtttccataaaatctatattcctttccg

SEQ ID NO: 14393 - DNA, 701 bp, Unknown
  gut microbiota DNA sequence
caattaccatctaagataattggattatacgtgagaaaatgttaaaaacttatctgatggaaaattatggatataatgaacctatttttttgaatgacttgacaattcagggattgtctgaaaatgcagttcggcaggccgtgaaacgacttgttgctaatggttttttggaacggtatgataatggaatctattatattccaaagcgtgacggattacttgggaagagttatctcgatccgtcgctggttattatgcgcaaatatatacaaagtaaatcagagatttatgggtatgtcacaggggaatcgtttgccaatcagttaggattaacaacgcagatgccagcggtgattgaagtggttacaaatcgtgaggcgacgaatggccgtactataacagtgggaagcgaaagagttagaataaaaaaggctccgattatggtttcagattcgaatgctgatcttctacagttacttgacagtattgggcaggcagaaaagtacacggagctgtcaattcatgagacaatagatatattgatttcttatgtgagaaagaaatgttttacgaaagatcagttgtcggaagtgattccggcattaactggtgcaacggcaaagaaattgatcgaatggggaatgatttatgaatttgcatcatgataaagaagcatttaaagaattaataatcggcgctgc

SEQ ID NO: 14394 - DNA, 646 bp, Unknown
  gut microbiota DNA sequence
agacaagaaagaaaaataaatcttccaataagatgatcgtaagaagaagagacggtaaagcaatcaaataagttgctaaatatgaaacaattgatggcacggttaagacaacgctgccgcgtgtagcggtctttcgtgcttgactataggaggtaaattatggctcgttcattaaaaaaaggaccatttgcagatgaaagcttactgaaaaaagtagacgctatgaacgcatctggtgacaaatctgttattaagacttggtcacgtcgttctacaatcttccctcagttcgttggtcatacaatcgctgttcatgacggaagaaaacatgtgcctgtattcgtaacagaagatatggttggacataaacttggtgagttcgttgctacaagaacttacaaaggacatggaaaagacgaaaagaaatcaggcgttagataagaactattttttgaaaggaggtttcatccatggctaagggacatagaagtcagattaaaagagaaagaaatgaagttaaagataccagaccttcagcaaagttatcttatgctagagtgtctgttcagaaagcttgctttgtattagatgctatccgtggaaaggatgttcagacagcacttgctatcgtaacatataacccaag

SEQ ID NO: 14395 - DNA, 2395 bp, Unknown
  gut microbiota DNA sequence
cgcaaacgctgagaacaacaatggaatgaaagcagaaaacctttatgttgcagagtgttatgcaaacaaaggaccaacaatgaagagaatcagaccaagagcacagggtagagcttatagaatcgagaagagaatgagccacattacaatcgtgcttgatgaaagataaggagggcaaacatgggacagaaagttaatcctcatggcttaagagtcggtgttatcaaagactgggactctaaatggtatgcggaagcagattttgcagatcttttagtagaagactacaacatcagaacatatcttaaaaagaaattatatgcagcaggcgtttctaagattgagatcgaaagagcatctgaccgcgttaaagttattatttacacagcaaaacctggtgtagtaatcggtaaaggtggagctgaaatcgagaagatcaaagctgaagtacagaaattcacatctaagaaattagttgttgatatcaaagaagttaagagaccagaccgtgacgctcagttagtagcagagaatatcgctttacagttagagaaccgtgtttccttccgtagagcaatgaaatcctgcatgagcagaacaatgaaatctggtgcaaagggaattaagacatcttgttccggacgtttaggtggagcagatatggctcgtacagagttctactctgagggaactattccacttcagacattaagagcagatattgattatggattcgctgaagcagacacaacttacggtaaagtaggtgttaaggtttggatctacaaaggcgaagtacttcctacaaaggctaataaggaaggaggagctcagtaattatgttaatgccaaagagagtaaaacatagaaaacagttccgtggttctatggctggtaaagctacaagaggtaacaaacttacttatggtgagtatggtatcgtagcaatggaaccttgctggattaaagcaaaccagatcgaagcagcccgtgttgctatgacaagatatatcaaacgtggtggtaaagtctggatcaaaattttcccagagaaacctgtaactcataaacctatgggtgttcgtatgggtaaaggaaagggtgcccttgagtactgggtagccgttgttaaaccaggtcgtgtattatttgaaatctccggtgtaccggaagacgtagctagagaagcattacgtcttgctacacacaaattaccttgcaaatgtaaagtagtttctcgtgcggatttagaaggcggtgtatcaaatgaaaactagtaaatatttagaagaattaaaaacacagtctgttgcagatttaaatgcacagttagtagacgctaaaaaagaacttttcaatttgagattccagaacgcaactaatcagttagataacacaagcagaatcaaagaagtgagaaagaatatcgcaagaattcagacactcattactgagaaagcaaaagttgctgaatagaactctagaaaggagaacttatcgtggaagaaagaaatcttagaaaaacacgtattggtattgttgtaagtgataagatggataaaacaatcactgttgcaattcaggataacgtaagacatccattatacaacaagatcgttaagaaaacatataaattaaaagcccatgacgagaacaacgaatgtaaaatcggtgataaagtaaaagttatggaaacaagaccattatctaaagataagagatggagacttgtagaaatcatggaaagagcaaaataattaaaggaggctacaagcatggtacaacaggaaagtagactgaaagtagctgataacacaggtgcaaaagagttactcgttatccgtgttatgggtggatctactagaagatatgcaaacattggtgacgttattgttgctactgttaaagatgcaacaccaggcggtgttgttaaaaaaggtgacgtcgttaaagctgtagttgttcgttcagtgaaaggtgctcgtcgtaaagacggttcttatatcaaatttgatgagaacgctgctgttattattaaagatgacaaaactccaaaaggaacccgtatttttggaccagtagctagagagcttcgtgagaaacagttcatgaaaattgtttccttagctccagaagtattataggaggacgaagatatggcaacaatgaaaattaaaaaaggcgatatggttaaagtgatcgctggaaaagataaagacaaagaaggaaaagtaatttccgtaaacaaaaaagataacaaagttcttgttgaaggaatcaacatggttacaaaacatgcaaaaccaagcatggctaaccagcagggtggaatccttcaccaggaagctccaatcgatctttctaatgtaatgcttcttcacaacggaaaagcaac

SEQ ID NO: 14396 - DNA, 573 bp, Unknown
  gut microbiota DNA sequence
aaaaggagctgcgaagcagcggagagcgccgcaggtgcgttttgcgaatggcgcggcgagcgataggaatcagaaaaggagaacaacatggggaaaattcactcgttagaaacatttggcacggtggacggtccgggcgtacggtttgtcgtattttttcagggctgcccgatgcgctgccagtattgccataatcccgatacatggaagatagaggatggggaagaaatgacagcggatgagatcatagaccgtttcgagcgcaaccgttcattctatcagaccggaggaatcacggcgacggggggagaacctatgttacagcttgattttctgacggagctttttacgaaggcaaaggaaaagggcattcacacctgtctggatacatccgggattatgtttccaaagaaacatataggaacagaacagatcagtgagagagagatcagcctcactggaataagtgaaaacatggcatcagacagaatggaaaagacagaacagctcatgtctgtgacagacctcgtcatgcttgatattaagcatatcaacgatgaggaacatcagaaa

SEQ ID NO: 14397 - DNA, 45090 bp, Unknown
  gut microbiota DNA sequence
tcgaccaacggcatggcagagtagccaagtccggaagggataaacgctgaaggcatctaagcgtgaagcccccctcaagatgagatatcccttccataaggaagtaagatcccttgaagactacaaggtagatagggcagaggtggaagtgtggcaacacatggagctgactgttactaatcgatcgagggcttgaccaaaagactcggaatctgtatgaagttttgaatgtatacttgaaaaagtgaatagaataagttatgatagcaatagttgaaaaactattctgcatataggggattggtcaaatggtatgataggagtctccaaaacttttggtgggagttcgattctctcatcccctgctcatagagtcttgagttttcaagactctatttttgattcattatgtttatattgtatatggtatgacaaacacagtgaattaaaattgtgaggagaggaagtgaaagctgggaatgatagcaacacatagagtaaaagattcaaatggaaaaacggtaggttttatcattgacgacacattttatgttgattactatatcaaaaataatattcagtacgttgataatttaagtctgacccaaaatgatattataaaagcgaatgaagaacttccagaggtagattataaaagatatgtaaataaaaaagaatacgagagcatagttaaaaacaatccttttatcagagatatacaaaaggatttaatgaaatggaaaaatgattcatcacataaggttttgcaattagaaggctccagacagataggaaaaacaacagaattaaaaaaatttgcatacaaaaattacgaatatgtcataatagttgacttagctgctgacacatataattttatagatgttattaataatggatgcagtcctatggaatttgaaaagtattgtcgtagagcgtcgcttccgcacttcgtagataataaaaatacaatattaattatagatgaaattcagagcaatagcgctgtttataattcaattcgtaaattacatgatactgtgaaatgcgatatcattgtaacaggaagttatcttggcagaatattaggggataaaaagttttttcatcctgcaggtacgatcagttatgcgcatatgtttacattaagcttcacagaattttgcagaatatttcagtgtgaaaaaattttaaaatccatagacatttatggtggaagcaatgaagcagattatgaaaaactggaaggattatatggtatttacttaaaaattggtgggtatcctgaagttgtaaagaaatatgttgaaacaaaaaacataaaagagtgttacagtataattgacaaattgctggaaacattcaaagatgaatccagagcatattttaatgaagcaagagaagtagagatttttgataacatatacagagaagctttaaagcaaatgtgtaatcgggatgatatgagtggaaagaatattttggaaacgattactacattggttaaagacagcacaaaattatttgtaaatagaagcgaagtggcaaatgcagttatatggcttaaatatgccggaatattatcaacatgcaatttagctgtagatggggatatgagaaaaataaatgaaagtagaaaagcttatttttctgattgtggaataacatcttatttagcagataaaagcttgataaaacgatcctcattagtaggcgtaattacagaaacttttgtgtataacgaattgcacaggttatttaaggtaccttacacagatttgaaagtaattgaggatgaggtgtgctattctacttatggaaattttgaattagacttcatgttagcggataggaacaagacggtatatggaattgaagtaaaaacaaaagatggggaaccaaaatctttaaaagtatatattgataaaaattttatagatcgcggtattgttgcaaaacctgcgaaaggaggacacggggataaatttgatacgattccgatttatacagtaggatgtcgttttccatatcatgaaatgaattagttcagggatacctaaattttaatacacttaataagagaaccgaaagctagatgaagccgagccgccggtaaatggttttacaaaaagtagcgtctcatagtttaccagaccgagggcgctatttttcacgtttaatgttaatgtaacagtgcagccggaaggctgaactgttacaaaatattttttgatagcaaaaaaatccttgcattcttttcgggagtatgataaaatatctcttgcttgggcggtttcacttaagtatccataagacgcaggagtggcggaatggcagacgcatcagactcaaaatctgacgctggcaacagtgtgtgggttcaagtcccatctcctgcatttgataatattattaaaaagccttgaaattagcagtttcagggattttttttgcccaaaagggcacaaatctccttgatatccccatccaatcccactacaacaaccatatcttttatatcattgtgttagaaacaaaatacaaaaatcagctatcgtacacgaaatccgtgtgacattccgtaacaaacaaaaacattagtgcacgaagcatagaaaaataggtgttcagtcagtatgtgaagaacgccatcgctgaacttcaatttgaagcagtaaaataattcttgacgtaagttatcatatatgataactttaaacatgtgaaaaccgcaattattgtacagattattcatatttcatagacaagcatacaggagggcgttcgtttggctcatgtgaaaaataaaaatcttgcagttggtcagcttacccctcgttatgaagtggtacagcaattaaaggaagcaagaaaagcgcaggatatgacgcaggaagtgttagcagaacgtgttggaacgaaaaagtctaatatttccagattagagagtggcaaatacaatccaagccttgattttttgatcaaggtggcaggaagccttggaaaacagatacagattaagatcaagtagaaggagtattttggttatgggcagaagtgtgacattaggcaatggcagagagatagataaagatattgagttgtgcaggacaacaaatgaaaagaccagtgagcaggcaattcatgtattaatggagaaccatatcccatttacgaaaagctggattccaattccttttttcctgcgtaagaagtttcatggcgcaagtcagatttatgtgatcaatacgaacaggaatcgttatagtcaggcgagaagtgccattgataagatggatatttatttcaaaagacgtcttgttgtgagcaattattaaaaaagtccaccatgcaatttgtaatcagaaatgtctgatgtaaactgcatggtggacttttatgcttcttactcattaagtgcgcgtaaattctcctcaaactgtttttgaagcagttttctggagtagcatgcagccacaaaagaggaaagggcaagattgtatacattcgtgtactgtacataatgccattttaagttttctttccagttcgtcagagtgatcgtcttgtcctcatctaaatgataatcgtagagattattgcgaagctcataggcggctgcataggagaggatatgtttcatcagaccggcagcatcggaaggaacgggaaggtctttcatatcgatcgcaccgctgcggtagattgcggcaaaacgtccggctggatgctttaactggaacaatccgtcaagcgtaaaattctcaaggtcagtgtcaaaagactgtaaagttgccagtactaaggtgtcgatcatctcctgaaaagccggggtggcagaacagtttttgacttcaaaatattcatccatgaaatcatagagaataaaatcctcgcacgtaaaatgcagatcttccatataggcggctgcaaattttggaaggaatgcaatcagagtgctatagtgaatggaacagatagccagagccgcataaaactgtacttctgtctgcagcaaaacttccagatcgatatctacattggaaaaatccacagaagcaatctcagggcacacctcttttaaaatacgattcaggatagcaagtccaaagccggacttatcatcaatgatcgcaatggcatagcacagcagtaccggatcaaaagaattctcggagaaagaaggagaaaaataaaaatctttatccagaaaacggtaaatatctgcgagattgtccatggaaagcggacactccaaagtatctttcagctctgttacgatcgctggattctcctttgctgcaaaagagagaaaacgatacacaacataagtctgaaaacggtcggtattttcctccggtccgttctctaaatattctatcaaaaattcggttgggaaaaactgatcaaaaaattcatccataataaagtctgcctttctttttcataatagtagggttgcgctggtacaaccgccaacattgattgacataatacaaaatgtgcaaaacttcggcacgagaacacaatataatatttttgcaaataaagcaataggacttttatttttaaggaaaatgacttatgatagatatgataattagaacgcaggtaaaaaaggagagagattatgttaagagcagcagattatcgtgaacgtgcaagagtatctttgagcggcaactggggaatggcagttctcatctgttttgtaggtgcattgcttggaggaatccagacggtggtaccggtttccgcgaactaccaatatggggagggaatgagtttacagatttttggactgaatatgaatttagatcagcttccagttgaaatgttaagcatgctgactttcatgttgggcgttatcagcatttattcgctggcacagtttgtaatcggtggtgcagtagagcttggtatgtgtgcttatttttccaaacgcgcattgggcgaaaatgcggacattaaggatgagttttcctatttccagtatttcggaaaggcacttggacttcgtattgtaacttctatttttatattcttatggacattgttattgatcgtaccgggaattatagcttcctatcgttatgcaatggcaacttatattttggcagagcatccggaaatgggaattatggaagcaatcgaggcatccaagcagatgatggacggaaataaatgggcattgttctgtctggatttcagctttatcggctgggcgttattgagcgcatgcacacttggaatcggtgatttattcttaaatccatacacaagaatggcaaccgctcatttttatctgaatttgagcagaggttctgccggaagcggagcggatgatttccagacagccatgtagttttaggtaaacagtaacgcagagtgaatgcaaaaatgtgaaaaatgtgagaactgatttcaattaaaaaaaggatgtgttaaaatagaccgtgttgtcgtcacgatattttgacacatcctttttctatggcgaagtaaccacatgagtaaaaactgggcagcgaagatgcagttttgcgaacgcggttctggtagctgcagaaaaatctataaagaaaagctgggaataaaatgaaacagatatggaataaaaaatatagaaagactgtcatcggaagtctggtgcttttagcagttccggttgcagcattttatctgatggaaggttatacgcacaatccatttgcggaagtaagaccgtgggcgcagttttttaatattgtgctttttgaactgctggcatggatttttgtctgcctgacaggaagaatacgaagcggacttcggatcgaactggtcattgctatgatttatggcattgcgaatgcgtatgtagtccgtttccgcacgaatccgatcgtgccgtgggatattttttcatggaaaacagcggcgagtgtggcttctaattatgattttaaaccggatacgagaatggtcatcatgacactggttttcctcgcgctgatcgcgggcttgcattttgtgaaaacaggatttccaaaatggaaattatggaaacgcctgattccggctggtgcatgtgtggttgtgcttgttctgtttgtgaatctgcttcagaatgaggattttcagacgggacacagattgtatccatttttatttacaccggcatttatggcggaagtaaatggaatggctgtcacatttgcgatggatcttgcctatgtgacggtggaaaaaccgtcaggttatcatgcggcggaagaacaggcagtgttggaaagctatgaaaatcaggagaatgaggcagatgacaatggcggggaagaacagcttccgaatatcattgtcgtgatgaacgagtcattttctgacttgaaagtactgggagattttacaaccaatgaagattatatgccttatctgcacagcttgcagaatggggcagagaatacggtaacgggatatttaaatgtgtccgtgtgtggcggaaataccgcaaacacagagtttgagtttctgaccggaaacagcatggcgtttctgccgcagggaagtattccgtatcagcagtacatcacgaaagaacttccggcatttccggcatatctggcgtcgcttggttatgagacggtggcaacacatccttattatgcggatggctgggacagggatacggtgtatccgatgctcggtttttcggagagtgtttttaaagatcagtactggggcgccggttatgtgcgtaaatatgtcagcgataacagctgcgtagataagatcattgaattatatgagaagaaagaagcaggaaaaccgttatttgtctttaatgtgactatgcagaatcacggtggatattcggacacctatgataattttacgccggacatcacagtggacggagtgcagaatgaggcgttgagccagtatctgtcactgattaagctttcggatcaggcattggaaaaactgatctcttattttaaagaggcagatgaaaagacaattgtagtgttttttggagatcatcagccaaacgatacagtggcagcaccgatcttgaatttgaatggcatgacaacaaagacactgacggaggaacagttaaagctccggtatgaagttccttatgtgatctgggcaaactatgatattgcagaggagaccggaaaggataccagcgccaattatctcgctgcggatgtgctgcagtacgcaggtatttccgagaatgcatatggcaattatctgttggaattacaacagaattatccggtcgtatcagcaatgcgcgtgctcacgaaagacggtgtggataccaatgcatccagttcaaaagacgaactgagagagtatcagagtttgcaatattaccagctttttgactgggaaaaagagtagatttacagtgcaaaaataagaaagtaaatgaagcaggagtttaaaagaatgaatcagacagaaaaaaatgagacaaaatccgcgaagtgggcgagacgcttgccgctttttgccgcttttttgattccattactgatttccgtgatcatctgtatcgaccacgaagtttatcctttcggggagcgttgtctgttacaggtggatatgtatcatcaatattgccctttttttacggagtttgtggataaattaagatctggtgagagcctgatgtattcgtggacgatcgggctcggggcggattttgtgtcgctctttgcctattatctggcaagtccgttaaactggctgatcttattatgcccgaaagggtatgtgatcgagtttatgtcgatccttatgatcgttcgcatatcactctgtggactgacctttgcctattacctgaaaaaacatttccatacgaatcatccggcgattgctgtgtttggaacagcctatgccctgtcggcatttatggcggcctacgcatggaatgtgatgtggacggattgtctggtgctcgcaccgctcattattcttggagtggagcagttagtaaaggaaaaaaaggtgacgttatattatgtcacactcgctgtctcgattttatcaaattactatatttccattatgatctgcatttttctggtgctttattttctgatccttctattggagcagaaagagggaaaaataggagcctgcctgcggtttggctggtattcgcttttagcaggtggaacaggagcggtgttactgatcccggaagccattattttaggggaaagcggatcacagggaatttcgtttccgagtgcaatggagtggtattttaatctgatcgcagagcttggaagacactgtattctggtggaaacgtacacagggcgcgatcactggccgaacctttacagtggtgtgttcacattgtttctgattttgctatatgtgatgaaccgtggaatcagctggaaaaagaaagtgccgcggattttgatgcttgcttttatgacggtcagctttgcaaataatatgctggattttatctggcatggattacatttcccggattcgctgccgggcagacagagctttttatacagctttttattgttagtgctttgttttgagacttttttacatttgagggaaaaccgctggtatcaggtggttgtggcactggttttagacagtgcatttttgtatgcggcgtaccgcttgtcggacagtgagatgatcggaagtgacagcttttttgtgaccgcagtatttatcgcagtgtatgcggttctgctgttgatatggtatgcgggaaagcaaaaggtgcgggagtatatttttttgatcacgtcaattgtagtaattgcggagcttacggtcaactttgacatgataggtctggatacggtaaacagaacttcttatgtcaaagactggaaggactatgaaaatgtcttgaaccaggcgaaggagcaggagagcaaaaacagcgctgtctatttttaccggacagaagaaatggagcggagaaccaaaaatgatgcagcgctatccggctattattctgcaacacagttttcttccctcatgaatatcaatgtgagccacatttatcaggatcttggaatggaaggcggaaagaatttttactgcatcaatggtgcgtcgccgttgatttcttccatgctctccttaaaatatgtgatcgcagataacgcattggaggaaggaccgcttcgcacgcttgtggcatcttccggggacacttatttatatgaaaataaatattcgcttccgcttggttttatggtggatgagcgggtggcagaactctgggattataaaaatggcggaggagtttccaaccagaatgaactggcatatctgcttggtgcagaggaggaaatgctctcggcggtcccggcagaatcagagactggcgtatccatgatttcggtgccggaggacggatactattttgcagcatacagttcggtgacgtccgatacgttagaggaggaagtcagtgacggaagaacaaagtcgtttaccaaagcgtcacatggatatattttagacctgggttatgcaaaggcaggggacgtgataaagattaaaaactccaatgaggagcgcgtggatatcacagcctataagctggatatggaggcacttgatacagcatatcagacattggattcacagacaatggagcttacctccttttcagaccgcaggatcaccggaacgattgatgtgaaaaaagcgggaggtcttgtcttttcgattgcaaaagaagacggctggaacgtgtatgtggacggaaaagagataaatccggagatttttgcagaggcgtttatcagtattccgttagaggaaggagcacatgacattgaactttgttatacaacaccaggattaaaaatgggagcagggatcagtcttggatgtgtgttcctctttctggtttcccttgcagttgtgaaaaaattcacagctgcagggaaaaatgagaataatcagatctcataaatagaatagtgattgcgaccgttgcgtgatcgccatattcctgatagctgctgcttcctgaagcatttgcttaaaattttgaattggttgatttgcatcagtcatatcgtaaactccttataaaacaaaatgcagttttaagtaatttcttcgggtaattttttgctgttttagcagattctgacatagatgaaaagaaaatgagcattttggactgaaaaaaatacacagattgtttcatggcggtgtctgcgagccttgtttgcgtgcagaaagtgtgataagattttcgcagaaaaggaatagcaatatcaggaaaagagaggataaggtaatgttagagacaggcattaaaggagaagcaaaagaggttgtttccgaaaaaaattctgcgaaagcaatgaaaagcggcgaactgaatgtatatgcgacaccttccatgatcgcccttatggagcaggcagcctataagagcgtggcagcagaacttgaggaaggcaagggaacggtcggcaccctgatgaacgtatcacatatttcagccactccgcttggcatggaagtgaccgcagtgagtgaacttgtggagatcgaccgcaagagactggtgtttaaagtggaagcttttgatgagcgtggcaagattggagagggaacccacgagcgttttatcattggtaatgagaaatttcaggaaaaagcaaataacaaatagactatatatagaaataaaaagtgaaaaacagtctaattagtacgatttattggacagtaaaaaagttacactcttttcagcttaagggaacggaacaaagttgaaaggagtgtttttttatgaaaggatatgtgatcgaagcaggctatatgggatatgtggacggtgcttacatgctctttgcagatgaagaagattatcaggaatattttagagagtggcattgaaataaaagtatcgcagtgataagatagtcacagacagctattgaagatagagaaaggtagtgatgatcatggctggaaaagagattaagatttacggggaagatgagagtgagttgaaggtccgtccttatgaacatcatgcgaagtattatgagacagatcagatgggcattatccaccattccaattatattaaatggatggaagaggccagaatggatctgatggaacagatcggtctgagctataagcagatggaagatatggagattatcagtccggtgctgtcggtgtcgtgcgaataccacagtatggttcattttgatgacacggtagtgatcgagacgaagatcacgaagtataatggaatcaagatggaagtggaataccggatgacagataaggagaccggagaactgcggacgacggcaaagagttcacactgttttctgaatcgttccggcagaccgatttcgctgaagaggtcttatccggagattgatacaaagttctttgagtttacggatgagaattaattcaggcacagttttttacttgaaaataagatagagagaggcagaagagatgataccagagagattagcagcacttcgggaagagatgaagtgcagaaatattgatgtttatgtagtaccaaccgctgattttcatgagtcagagtatgtgggagagcattttaaggcaagaaagtttatcacaggatttaccggttccgcaggaaccgcagtcattaccctgtcagaggcaggactgtggacagacggacgttattttgtgcaggcagagaagcagttagagggaagcactgttacgttataccgcatggctgaggaaggtgttcctacagtagaggaatttgtaaaagacaagctgccacagggcggctgcatcggttttgacggcagaaccgtgaatggaagctggggtgagaagtttgccgcgatcgcagaggaaaagggcggttcactttttgtcggggaagatctcattgatctgatctggacagacagaccacagttatcaaaggcaccattatttatattggaagaaaaatattccggcagaagtacagcagataagattgcagatgtccgtgcaaagatggcggaggaaggcgcaaatgtgcatatccttaccagcctgtgtgatattgcatggcttttgaatatccgtggtggtgatattgagagcgtgccggttgtattatcctatctcgttctgacagacaaagagtgcatctggtttttacaggaagaagtagtggatgatacgatccgtgcttatctggatgagaaccatatcgagtcaagaccgtatgatgcgatttatgagtatgtgccgaccattccggagaatgcggctgtgcttatgaacaagaaggctgttaactatcgtatctgcaatgaattaaataagaacattcaggttataaataaaccgaacccaacagagcttatgaaagccattaagaataagacggaagtggataatacccgtatggcacatgtcaaagacggtgtggcagtgacaaagttcatgtactggctgaagacgaacattggcaagatcccaatgacagagatttctgcatccgattatcttgaggcaaagagaagagagcaggagaattttatcgaacttagcttttctacgatttgtgcatatggcgcaaatgctgcgatgatgcattattctgcaacaccggagtcgaatgccgagttaaaaccggaaggatttttacttgtggattccggcggacattattatgaaggaacaacagacattacaagaacctttgcattaggaccgatcacggatgaaatgaaacagcattttaccgctgtatgccgttctaacatgaagcttgccaatgcgaagtttttgtatggcgcatgtggattgaacttagatatcctgtcccgcggtccattgtgggatatgggaatagactacaaatgtggaaccggtcatggagttggttacattttaaatgtacatgaaggaccaaacggattccgctggaagatcgtaccggaacgccaggacagcggtgtgttagaagaaggcatgatcactacggatgaaccgggtgtatatctggaaggaaagtacggtatccgtaccgaaaatgaactggtttgccgcaaggcagaaaagaatgaatacggacagttcatggaatttgagaatatcacttatgcaccgatcgatctggatgcgatcgatccggatcagatgagcccgcgtgagaagcagatgctcaacaattatcacaagaaggtatacgaagtgatttctccttatatgacgaaggaagagaacgagtggctgaaaaagtatacccgcgcaatttaatcaattacaggatgggactgtcgcatgtggcagcccctttactgctttaaagaaggagacacaaagcttatgagtgaaaagctggtactgatcgatggacacagcattttaaaccgggcatttttcgggatcccggatctgacaaattccgagggacttcatacgaatgcagtctatggatttttgaatattttatttaaaattttagaggaggagcagccggattatctgacggtcgcctttgatgtatcgcagccaacttttcgtcataagatgtatgcagaatataagggaaccagaaagccgatggcggaggaactgcgccagcaggtgcctctgatgaaggaaatgttaaaggcaatgggtgtgaccattgtggaaaaaggtggttacgaggcagacgatattttaggaacgattgcaaaacgaagcgaggcagaaggcctggaagtatcggtcgtgtcaggagacagggatctcttgcagcttgctaccgaccatatcaagatccggattccgaaaacaaagcgcaccggaactgagattgaagattataacacgaaagaggtcatggaaaagtatcaggtgacaccgatcgaatttatcgatgtgaaggcactgatgggagatacctcagataatattcctggggttccgggaattggtgagaagacagcgaccgcgctcattgcccagtacggaagcattgaaaactgttatgcacatgtagatgagatcaaacctccgcgtgcaagcaaaaatttaaaagagaattacgagcttgcccagatgagcaagacattagcgacaattgaaatcaacgcagacattgactatgatttgaaaaatgcaagattagaacacattcaggatttgtatacagaggatgcttatctgatgtgcaaacggctggagtttaaaaatatgcttggcagatttgaggtggatgcaccgaagaatcaggcggaagaacactttaagcttgtgacagacaaaaaggaagcagagaagatttttgccagaatcagagggttagaatgtgcgtttgagattattccaagggaagaaaagaaagacgcccatatggatgcttccggtcagatgaatctttttgccacaccacagacgaatgagtttcttggaatagcggtatgcttcggagaggaagatacctgctttttcaaggcgggagaggaattgacgagcagtgtgctgttagaacttcttacacagtcagaagcggcagcatatatgacactggatctgaaaccacagcttggaatgctccatatgatcgagcagaaagaaaacggctgcatgaaccagaaaaatatatttgacaatgtcattgcggcatatctgctcaatccattgaaaaatgaatatccgtatgaggatattgcaaaagactattgcagtcttatgatcccttcgagagcagatctgcttggaaagttaagttttgaggcagctttggaggaaaaaccggatgaactgttaaagactgtctgttttatggcatacaccgctttttccagcaaaaaggcaatgcaggacgaactgaaagcgaccggaatggagaagttatatgagacgatcgagatgccgttagtgttcacacttgctgacatggaacacactggaattgcgattgatgcagcgaatttgaaagagtatggagagaagcttgcagtccgcattgcggagttagaaacacagatttataaagaggcaggagaagaatttaatatcaattctccaaaacagttaggtgtcattctgtttgaaaaattagagatgccttatggaaagaaaacaaaaaccggttattcgacagcggcggaggtgttagataagcttgcaccggactatccaatcgttgcggatatcttagagtatcgccagcttaccaagttaaaatccacgtatgccgacggtcttgcaaattatatcagagaagacggaagaatccatacttcctttaaccagacgatcaccgtgaccggaagattgagcagtacagaaccaaatcttcagaatatcccgatgaggattgaacttggaaggctgatccggaaagcatttttgccggcagagggatgtgtgtttatggatgccgattattcccagatcgaacttcgtgtgttagcgcacatgtccggggatgaaaagctgatcgaggcataccgcgaggcacaggatatccaccgaattactgcatcgcaggtgttccacattccgtttgaggaggtaacagatctgcagcgaagaaatgcaaaagcggttaactttggaatcgtttatggaatcagctcctttggactgagccaggatctcagtatcagcaaaaaagaggcggcggaatatattgaacggtattttgaaacatatccgaagatcaaaacatttttagacggactggtggaagatgccaaaaagaatggttacgtgaccacgatgtttggcagaagacgtccggtgccggaactttcgagcagcaactttatgcagcgttctttcggagaacgagtggcaatgaatgcaccgattcagggaactgcggcggatattatcaaaattgcaatgatccgtgtgcatgacagactgttggaggagcatttaaaatcaaggctgatcatcacagtgcacgatgaacttctgatcgagacagcagaggatgaaattgacagagtgaaagagatactgacagagggaatgcagcaggcggcagatttaaaagttgcgctggcaattgatcttcacaccggaaaaaactggtacgaggcaaaatgattttaccggaaaatcagtgagcaaccaataagataaaggcggacgtaaattatgaaatttataggaatcacaggcggtgtgggcgccggaaaatcagccgttttagattatctggcaacaaagcctggcgtgcgtgtcatgttagcagatgagatcgcacatgaacttatggaaccgggaacagactgttatgagcagatccggaaaacatttccgaatgaggatatttacagggaagacggtcactttgacaggatgaaactggcaaaggttattttctcagatgagaagaagcgtgtgcagatgaatgaaatcgtgcatccggcggtcaagaggtatgtgatcgcagaggcagaccgggggagacaggaaggaaagcctgcgctacttgttttagaagcagcacttctgatcgaagaacattatgatgaaatttgtgatgaactctggtatatttatacaagagaagatgtccgggaagcaaggcttatggaatcgagaggctattccaaggagaaagtgcagcagatatttgcaagccagttaaaggaagcagagtaccggagacattgcagtattgtgatcgataacaatgcggggttggcagaaatgcagtatcagattgatgaggcagtggagacaatagtgagaaaaaggtaagtgagagggcacggcagatgaatgaaacaaaagagttcgaacagccatatgtatttggactggatataggaacacgaaatgttgtaggtactgtaggctgcaaagagggaaatgaatttatcgttgttgcgcaatatgtcatgcagcacgagacacgggcgatgatcgatggtcagattcacgatattggacgcgtaggaaaagtcatccagacggtaaaagaggaactggagaaacagattgaatgtccgctgacagaggtatgtatcgcggcggctggtcgtgtattaaaaactgtaacgacaaatgtcgagtatgaatatccggaggagaccgttgttaccagagaagatatccatacattggatctgcttggaattgaaaaagcacagtctattttaaaagaaaaaaatgatacaaagtataagttttactgtgtgggatattccgtggtgaaatattatctgaatgatgaagtttattcgaatattgagggacacaaggcagatattatcagcgaggatatcattgtgaccttcctgccggaggatgttgtggacggactgtattcagcggtcgcacaggcaggacttgcggttgccaatatgacgttggagcctatcgctgcgattgatgtggcaatccctgaggcgttccgtatgttaaatattgcgctggtggatgtaggcgcaggaacatcggatatttctgtcaccagagacggaagtatcattgcatatggcatgatcccgcttgccggagatgaactgacagagctgatcgtgcagcattatctggtagattttaagacagcagagcgcatcaagcttgcaagcacgacggaggaaatgatcacctacaaggacattatgatgatcgaacacaccattccggcgaaagaagtatgggaattgacggagccggtaacggataaaatgacaaccgcagtggcagagaaaatcaaagaattaaacggcggacagtctgtcagtgctacgtttgtagtcggcggtggcgggaaaatccacggttacacggaaatgcttgcggaaaaattaggtcttccaaaagaacgtgtggcacttcgcggagaagaagtgctgcaggaagtaacttttgaacagccggatattgaaaaagatccactgatcgttaccccaatcggtatctgtctgaattactacgatcagaaaaacagctttattatggtacatttaaacggtgagcgcgtgaagatgtatgacaacaataagcttcttatcatggatgcagcattgcaggctggcgtagccaacgaggatttgttcccgaaacgtggaaaagaaataaactatacagtcaacggcgcagctagagtggaacggggactgccaggagaatctgcggtgattaccatgaatggaaaaactgcaagtatcaatacgaagttagagccaaatgctgagattgagattattccgtcgacagctggggcagatgcagtggtcacgattgaacagttagaggaatatcatacatcaacggtcacttttattgtcaatggcaagaaaatcgtttgtccgcggtttgttgaggtgaacggtgaattacagccggcatattatcagatcaaagagggcgatgagatcgagacaagggcttactatacggttgagcaggtagcagagtttatggatgtggagatcgacacggaaaaagagattattgtgaataaccgtgtggtagaccagaattaccttgtctatgagaactttaacatcgaatggacgatcctttctttccgtacccatgaatcagatgcagacgcgcaggaggcatccgaaggtacagaggaaggagcagacgtgacagaagcattggcagatgaaaatgcagacggtgcagcagaaaatgagaatctggcacaggcagcagagactcttgaacagacttcggaaaaggaagaaaagcaggaaaacgaggagacagaagaaaaagcagatccggaaacagagggagaaacagtacatgtggaagaaccaagcgtacattctgtggaagtgatcatcaacggaacgcctgtaactctgacgggaaaagtttcctatacgtttgtggatatctttgatttttacgaatttgacctttccgcttcggctggaagaggaattattacaaaactaaatggtcagaacgctcaatacaccgcagagttaaaagacggtgacgagatcgtgctggcttggaaagagaaatagatttatggaattatgcagtattgcaagtggaagcagcggaaattgtatctgcgttggttcggacgactgtcatgtactgatcgacgcaggaatcagcggaaaacggatcgagaatggattaaacagtattgatctgaaaacagaggagatgaaaggaatcctcatcacccatgaacacattgaccacatcgccgggcttggcgtgatcgcaagaagatatgggattcccatgtatgccacggcgggaacgatagatgctattttacatacaaaatccgttggaaaaattgatgagacactttttcagacgatcagaccggaagtggattttacaatcggggatcttacgatcgaaccgatctctatctcccatgatgcggcagatccggtcgcgtataaaatcagacagcaggaaaaagtggtcgcagtcatgacagaccttggaacctatgatgatcatattgtagaaaaattacacaatacagatgtccttttgttagaggcgaatcatgatgtgcgtatgctgcaggcaggagcatatccgtatccgctgaaacagcgtatcttaggagacagagggcatttgtctaacgagcgcagcggacaactgttaggtcaggtgcttcatgacaagttaaaacacattgtgttaggacatttaagcaaagaaaataattacccggaacttgcctatgaaacagtacgtttggaagtggaaatgggagacaatccttataagggagatgatttcccgatgtttgtggcaaagagggatgaagtatcgcagaagatcgtattctaatcgtatttataaaataaattaataaataaaaagaaacttagtagtggaaataataaaaagagtatgctatcatgaaacataattatagtttggcccgataatgtgaaaattatcaaatcggactgtaaaaatagtgaggagacatcgaatatggaaaataacgcaaataaaacgattattacagtagtaggaaaagataccgtaggtatcattgcaaaagtctgcacctatctgtcagaaaatggtgtcaatgttttagatatttcccagaccattgtatcaggatacttcaatatgatgatgatcgtggatatgacaaaagctgcaaaaagcttcgcagattgtcagaaagatctggatgtattaggcgaagagatcggcgtttcaatcaaatgccagaaggcagaaatcttcgatatgatgcacagaatctaggaggaaaacgataaatgattaatttctttgaggtaaatgagacaaataaaatggtcgagcaggagaacctcgatgtccgtaccattaccattggtatcagtcttttagaatgtattgattctaatctggataaattaaatgaaaatatttacaaccggatcacaaccgttgcaaaagatcttgcagcagttggcgagaagattgaacatgagtttggaatcccaatcgtaaacaaacgaatttcagttaccccgatcgcgttagttggcggtgcagcctgcaaaacaccggaagattttgtaacgatcgcggatacgttagaccgtgcagcagaaaaagtaggtgcaaacctgatcggtggctactctgcattagtttccaaaggcatgacgaccgcggatgaaatgctgatccgttccattcctatggctttgtgccaaaccaaccgtgtgtgcagttctgtaaaccttgcttccacgaaaaccggtattaatatggatgcagtcaaattaatgggagagatcttattgcaggtagcggaacagtccaaagaccgtgattccgtagactgcatgaaacttgtggtattctgtaatgcaccggatgacaatccttttatggcaggagcattccacggtgtgacagaagccgatgcaatcattaatgtcggagtcagtggaccgggcgttgtgaaaacagcgattgaaaaagtgcgtggtgagaattttgaagtgctctgcgagacaatcaaaaagacagcatttaaagtaacgcgtgtcggacagttagttgcacaggaggcttcaaaacttttaaatatcccatttggtattgtggatctgtctttagccccaacacctgcaatcggtgacagtgtggcagacattctctgcgagatcggcttggagtatgccggagcacctggaacaacagcagcacttgcactgttgaatgatcaggtgaaaaaaggtggtgtcatggcatcttcctatgtcggcggattaagtggtgcatttattccggtcagcgaggatcagggaatgatcaatgcggtacaggcaggtgcgatcactttggaaaaattagaggcaatgacctgtgtctgctccgttggtcttgatatgatcgcaattccgggtgacacgaaagcaacgacgatttcaggtatgatcgcagatgaaatggcacttggtatgatcaaccagaagacaacagcctgccgtctcattccggttatcggaaaaggtgttggcgaacaggtggaattcggcggattgttcggttatgcaccgatcatgccggtaaataaattctcctgtgatgattttatcaatcgtggaggaagaatcccggcaccgatccatagctttaaaaattaaatggaaacgaaattttgcagaaatgcatgtgaataacaaaagtaaccagcttcagaataaaagatgtgcaaaacaggaggacttatgaaatcaatctcattagcaaaagaacttgcaggaaattcttatccgggacgtggaatcgtgatcggaaaatctgcagacggtaaatatgcagtaacagcttactttattatgggaagaagcgagaacagccgtaaccgtgtgttcgtggaggacggtgagggaatccgcacacaggcatttgatccttccaaattaagtgatccaagcctgatcatttatgcgccggtccgtgtattaggcaataaaacaatcgttaccaacggtgatcagacagatacgatctatgagttaatggataaacagcagacattcgagcaggcattgagaacgagagagtttgagccggatgctccgaactatacaccaagaatttccggaatcatgcatattgaaaacggaaattacaattatgcaatgtctattttaaagagcaataacggaaatccggatgcatgcaaccgctatacctttgcataccagaatccggttgcaggagaagcacattttatccatacttacatgggagacggtaatccacttccaagctttgaaggcgaacctaagcttgtggacttagagggcgatatcgatacctttaccaatctggtttgggagaatctgaatgcagataataaagtgtctttatttgtaagatacatcgagatcgaaaccggaaaatacgagacaagaatcgtgaacaagaatagatagaaaatgaagtataagtgagaatggagattaaaatgaaagaattagagttaaaatacggatgcaacccaaatcagaaaccgtccagaatctatatggaaaacggtgagcttccaatcaaagttttaaatggaaaaccgggttatatcaactttttagatgcattcaacggctggcagttagtgagcgaattaaaaaaggcaaccggacttccggcagcaacctcttttaaacatgtatctccggcaggtgcagcagtcggacttccattatctgaagtagagcgcaaaatttactgggtagatgatatggatgtggaatttactccgctggcaaatgcttatatcagagcgagaggcgcagacagaatgtcctcttttggtgattttatttccttatccgacgtgtgtgacaaagagacagcactcgtgatcaagagggaagtttctgacggtgtgatcgcaccgggttacacagacgaggcacttgagattttaaaagcaaagaaaaaaggaaactataatgtcatcgagatcgatccgaattacgttccggctccaattgagcataaggaagtattcggaatcacattcgagcagggaagaaatgaactggtgatcgatgaacatttctttgacaacattgtgacagagaataaggaaatcccggattctgcaaaaatggatcttgccatttccatgatcacattaaaatatacacagtccaattctgtatgttatgtcaagggcggacaggcaatcggtatcggtgcaggacagcagtctagaatccactgcaccagacttgcaggttctaaggcagataactggtggctgcgtcagtctccacaggtacttggacttcagttcttagataagatcggacgtgccgacagagataatgcgattgatctttacatcggagaagattacatggatgttttagcagacggtgcatgggagaatatcttcaaagtaaaaccggaagtgttcacaagagaagaaaaacgtgcatggttagacaaaaatacagatgtagcacttggctcagatgcattcttcccatttggggacaatgtggagcgtgcgcataagagcggtgttaaatacattgcacagccgggcggttctatccgtgatgataacgtgattgaaacctgcaataaatacgatattgcgatggcattcacaggaatccggttgttccaccattaagattatctaagctgttgcgggttggaaggaggaacgtccgtgagtgaagtatatgaaaagttaatgaaatgctatcggagtgtccgtgaaaaaacagattttgtgccggaggtggcattgatcttaggctccgggcttggcgattatgcagatgatctgcaaatcgaggcatctattgattatgctgatattgagggatttccggtttctacggtaaaaggacataaaggaagatttgtatttgctcatgttgaaggtgtttcggtggtgatcatgcagggacgtgtgcattattatgaaggctatccaatgtcagacgtagtacttccaacacgtctcatgggacttttaggagcaaaaaagatcattcttaccaatgcggctggtggcgtgaattataatttcaaaccgggtgatttcatgcttatcacggatcatatcacgacggcaattcctaatcctctgatcggaccaaatatcgaggaacttggcacaagattcccggatatgagtgaagtatatgcggtggaactcagagaaaaagtgaaaaaagcagcagaaaagcttcagataccattgcaggaaggtgtttatatgcagtttaccggaccaagctatgagacaccggcagaaatccgtatgtgcagaacatggggcggtgatgctgcgggcatgagcacagcctgtgaggcagtggcagcaaatcatatgggaatgaaagtatgcggtatttcctgtataacgaatcttgcggcaggcatgtcaaaagaaaagttaaaccacaaagaagtgcaggagacagcagaccgtgtctcaaaacagtttaagcagcttgtgacagaagtgatccggacaatctgacacaggaactatgcaggcgaaaacttgcacacatcagcgcgcaaagagtcgcaaagcatctctctgttctagtacaacctttgtaagttgctgtgcatatcagagtgtacggatgttatatcataacagaacaatctcgcgggtaaattcactgcgtgggggtgttctgtttttttgtgcaagaatctgttcatagagatcggctgcaaaaatatctttttcaaggagacggaaagcttctggagaaagcatatttttggcattggcaagtttaccaatcaggggaatctcggtgtgctttttgacagcacctaatacgtcagaggatgatctcttaaaaccaagcggtcttagatatggaacataaccaatttgtttcgcaaactcgtagtcctctgttgtcatgtgcagtaacatatgtgtaaaaatccggctcatgcgtgtgtaagtaatatcgcgtgtctggtttttcacggcaaactgtgaaaaagaagaaaatgcagggaggttctttttcaggcggtttgcaatttctgtattacagtcggcaaaagaggctagttcctcaggtgtatgcaaaagcagcagataatttaaaatgccggaaaaatcatctgcttccagataggcagaggacgcaagataatctgaaaaaatgcgaaaagcttccggcggcatggaataaaagagcgcggcatggtctgcgccagaagcagaaaaatttttcaatgtctgtcggatcgcagaagcggaggcattttttgcaagaatatccgtgtcgtggtatccggcaccttcccgcaggataggataaggaaggatggaagatccggatgtttttaaggctttcagatactcaatgccaagaatattattcggggtggataaaaccgcagagagctgggctgccatattcgctgatgcaagggattgcgaggtaaaatactgttctaacgcagccattcttgcggctggaaaatttttcccttcttttaaataagtactgagtgcttcctgataagaaagcggctcgtttacaagtgtatctgcaatctggtctaacagggagaggtcttttgtttctgcaccaaaacaaaggtagtccacacaccccatttgttcaaagagcgcaacgccggcttttgcaaaatattccgcagaggcgcaggcaaaaagagcaggaagttctaccacaagatctgcaccgcaggagagagccattttcgttctcgcatatttgtcgatgacagcaggttcaccgcgctgcacaaagtcaccgctcatggcgacaatgacaaaatcactgtccgtttcctcttttatctttgctatctgataagcatgtccgttatgaaatggattgtattctgcaataatgcctgtgatcttcatggaaaaacagttgccctctcttttttttcaaaattccgttacttagtagtaagataaccattttcccaggaaaaatcaataaagaatcgttaaaaaattgacaagatgtttcgcattaaatacatgaaataaggtaaaaagtggcttgtcgcaccgaaaagaaaggcgtatactaaagctatatgcggtctgtctgagaagaccctgaaaagtagaaaatgtctggaatggcataaaaagattgatagaggagaaaaatcatgaacgtattagtaattaactgtggtagttcatcattgaaataccagctcattgattcagaaacagaaggagtattggcaaaaggtctctgcgagagaatcggaatcgacggaagattagtttaccagaaaaccggtcttgacaaagagatcacagaagctgctatgcctacacacaaacaggcaatccagatggtattagacgctatcgtaaatccaaagactggtgcattaaagagccttgctgaggtagatgctgttggtcaccgtgtcgtacatggtggagagaagtttgcaagctctgttgttttgacagaagaagttcttgcacagatcgaagagtgcaacgatcttgcaccacttcacaatccggcaaacctgatcggtatccgtgcatgtcaggaattaatgccaaatgttcctatggttggtgtatttgatacagccttccaccagacaatgccaaagaaagcatacctttacggtctgcctcatgaatactatgagaaatacaaagtaagaagatacggtttccacggaacaagccacagctttgtatccaaacgtcttgttgagtaccttggaatggatctggataattccaaagtgatcgtagcacatcttggaaacggagcttctgtcagcgctgttgtcaatggaaaatgtgtcgatacttccatgggacttactccactcgaaggtcttgtcatgggaacacgttccggcgatatcgatccagctattatggagtttattgcaaagaaagaaaaccttgatattgaaggtgttatgaatgttttaaataaaaagtccggtgtacagggaatgacaggaatttcttctgatttccgtgaccttgaggcagcctataacgagggaaatgagtatgcgatcaatgcgatcgaagtattctgctaccgtgttgcaaaatacatcggttcctatgtggcagccatgaacggagtagatgcgatcgcatttaccgcaggaattggtgagaataccaatctggtccgcgaaaagatcgttgcttaccttggctaccttggaatcactattgataacgaagtcaatgatgcaactcatggtgatgaggcagtgatctccacacctgattctaaagtaaaagtctgcgtgatccctacaaacgaggagcttgcaattgcaagagagacggtcgcacttgtaaaataagtaagaacaacttttccggcttttacagccgggaaatactgtcaaggaaaaaaacttgacaataaatcaaaaaagttgttgacaaaagaaagacacctatgtataatcatttaggtgtgaaaacctcgccttaggagtttgggcttaagcgagttttgggagagcgctgtgattatagatatttcaagtattgtaacttgtgagaacaagtccgtaacagaaaaagttcagatcgagttagagtcttttgtatcgagattaggtgaattcccaatcattgaaaaggcaccgattgatttacagatcgcaaacattgacggcggcaagctgcgcatcagtggaactgtggatctggcagcatcaataccgtgtagccgatgtctggaagaagttccgacaagaatccatttcgacattgacaaagagttccgtttggagaattcggcgatcaatgatgaagagatggaggatatagactacctgattggatttgatctggatgtagataaacttatctatggagagattttggtaaactggccgatgaaagttctgtgcaaagaggattgcaaaggaatttgcaaagtgtgcggaatgaacctgaataagggtgactgcaattgccagagaacagaactggatccaagaatggcagcaatccaagatgtctttaacaaatttaaggaggtgtaagtaaatgtcaatttgtccaaaaaataaatcttccaaaggaagaagagataaaagaagagcaaactggaaaatgactgctcctgcattagtaaaatgcagcaaatgtggtgaattaatgatgcctcatagagtatgcaaaaactgtggctcatataacaaaaaagagattattcctcaggactaattcttaagagaatcagaggactttcaagcaattgaaagtcctttttctttaccaatttttaacaattacagtcattgtagactgtttggggctatgctataatctactatatcacgaagaaaagaaggaaataaatatgggtgatttttttaatgtggacaacaaattttttcagggattggggaagatcatagacgttatctgtctgagtgtattctggctgtttttatgcattccggttgtgacagccggagcagcgacaacagcactgtattataccgtgaataaagtgatccggaataaccgcagctacataggaagggaattctggcatgcgtttaagtcgaatttcaagcagtcaacggtcgtatggctgattcttctgttattatatggaattatgggatttgactgctacgtgatgtaccagtatgccaaagccggcatttcattaggaaaaatgtatatcatatttgcagtgctgatgctgtttgcgacaatgtgggcaatctatctgttcccatatattgcgcgctttgagaataagacaaaagtgatcttgaagaatgcagcactgatcgcgcttggaaacctgtggaagacactgcttcttctggtgattttccttgcggcagtgtttgcaacctacatttttccgcctgcagtttttgtaatcccatgtgtgtatatgctggtggccaattttattctggaaaagattttccagaaatacatgtctccagaggacatcgaggctgaaaaagagcggaacatggaatattacaattaaaaaagtggaatacacaaatatattgatttatagaaaaagttatagtatattttcttatagacgtgtaaatagcacttttcgtaaggcagttaacacgcaggattggagaagtgtatgcaacaggaaatcacgagagttgcactggatgcaatgggtggagataatgcgccgggagagctggtaaagggtgcagtcgatgctgtgaatggcagaccggacatcaaagtgcttttagttgggcagcaggatgtcgtggagaacgagctgaagcagtatacttacccgaaagaacagattgaagtggtacatgctgaggaagtgatcgagacagcagaaccgccagtgaacgcaattcgaaaaaagaaacagtcatcaatcgtagttggaatgaatatggtaaagcagaaggaagcagatgcttttgtttccgcaggaagttcaggtgcgatccttgtcggaggacaggttatcgttggaagaatccgcggaattgagcgcccgcctttagcaccactgatccctacagaaaaaggtgtttctctattgatcgattgtggcgcgaatgtagatgcaagggcatcacatctggttcagtttgcaaaaatgggatccatttatatggaaaatgttcttggaattaagaatccaagagttgcaattgtaaatattggagcagaagaggaaaagggcaatgcgctcgtaaaagagacattcccattattaaaagagtgtacagacattaatttcgttggaagcattgaggcaagagagattccacatggtgaggcagatgtcattgtctgtgaagcttttgtcggaaatgtcatcctgaaattatacgaaggtctggcaggtacattagttggcgcgatcaaaaaaggaatgatgagcaccttgcgaagcaagattggtgcagcacttgcattaccggctttaaagtccacactgaaaacctttgatgcatcccagtatggcggagcaccgcttttaggactgaatggtcttgtggtaaaaacacacggaagtgccaaagcaaaggaagttaccaattccatttatcagtgtgtaacttttaaagaacaggatattaatggcaagattaaaaagaatattttaggttctgcagaacaggaaggaatgtaattatggaattcgaaaaactgaaaaaaattattgctgaagtattaaatgtggatgaagaggaaattacaatggaaaccacttttgtggatgaccttggggcagactcattagatgttttccagatcattatgggcttagaggaagaatttgatattgagattccaaatgaagaagctgagaaaatcgtaacagttggagacgcagtggaacaaatcaaaaatgctttaaactcataaatataatttttaagcatacaggctgtcgcaacgaatcttttctatgtgcgacagcctatttagttacagttgggaaatgagagaggttttttggtaatggttcaggtagctgaagtattacgaaaaatcctccgtgagaggagaaaaacatggcaaattttttagagttacaggaaaaaataggatatgaattcaagcaggaaaaattactgcgtcaggcgttgacacacagttcttttgcaaatgagaagcatttgagaaaacattcagacaatgagagacttgagtttttaggggatgcagtgttagagatcgtttccagcgacttcttatataagacttatccggacaagtccgaaggggatctgacaaagctgcgtgcaagtcttgtgtgtgagccgacactggctatctgcacaagagagatcgaacttggaaaataccttttccttggaaagggagagaatcagaccggtggaagaaaccgtaattcgattttgtcggatgcacttgaggcagtgatcggagcgatttatttagacggaggctttgaacatgccagaacttttatccacaagttcattctgaccgacattgaacataagaagcttttctatgactgcaagacaagcttgcaggaagtaattcagggacattatgacgaggatttaaattaccgtctgatttcggaggagggaccggatcatgacaaacgcttctcggtagaggcaaggattggtgagagagtgatcggaacaggagtcggacatacgaagaaggctgcagagcaggaggctgcttatcaggcacttctgcttttacagcctgtccagaaaaaatagtgcaggaaacggagttatgaaatgtatctgaaaagtatagaagttcagggattcaagtcatttgcaaataagatcgtatttgattttcacaatggaatcactggaatcgtaggaccaaacggtagtggtaagagtaatgttgcagatgcagtgcgctgggtgttaggtgagcagagtgcaaaacagcttcgtggtgcaagcatgcaggatgttatttttgccggaaccgagaaccggaaaccattaagttatgcgtatgtagccattacaatggataattccgatcatcagcttgcaattgattttgaagaagtgaccgtgtcaagacgtgtttaccgttccggtgagagtgagtatctgatcaatggaagtccgtgcagattaaaagatgtcacagaacttttttatgataccggtatcggaaaagaaggttattccattatcggacagggacagatcgagcgtatcttaaatggtaaaccggaagaacgcagagagctgtttgatgaggcggcaggaatcgtaaaatataagaagcgcaaggcaactgcccagaaaaagttagagaatgagcgtgagaatctggtgcgtgtcaatgacattctggcagaactggaacgtcaggttggaccgttggaacgtcaggcggaaaaagcacgtatttatttaaagaaaaaagaggaattaaagacttttgatgtcaatatgttcttattggaaatggagcgtattgacagccagttagcggaagtcaaagagaaatattccattgcagaccaggattatacgcaggcgaaggaaagctacgagaagatcaaggctgaatatgaaaagcttgagcaggatatggcggcagaggatgaaaagatcaatacaatccgtgatgagatgagccagtctgctgtgacgaagaacaagttagagagtcagatcgagattttaaacgagcagatccgttcggcagagcatacggatgaacatatgcagagccgcttggatacaattgaccatgagaaagaagaacgtatcgcttccggaaaaacgtatgaggaagaaaagctttctttagatacacagatcgcggcagtggaagaaaagaaaaaaactgccgaggaagcattggcggcattgcaggcagaaatcgccagatgcacggaaggaatggaaaagggcaagagcgagctgatcgagttattaaacagcaaggcttctatcaaggcgagacagcagagatttgacacaatggaggaacaggtcaatatccgcaaagctcagttgaaccagaggctgctcgcaagaaagacggaagaggcagacttggattctgttctggcagagtaccagaaagatttagatgcagtcaatcagaaaataaaagagttgaaacaggcgggactttccatggaagaaaagaaccgcgactggaagaaaaaatcaatcgagacaacacatacgttagaggagacgcttgcccgatacaataagcagcagtcgaaactggagtcgttaaaaaacatcgcagaacgttatgacggatacggaaacagtatccgtaaagtcatggagcagaaggaacagaataagggacttctcggtgttgtttcagacctgatccaggtagagaaaaagtacgaggttgccattgagacagcgcttggcggaaacatccagaatattgttaccgaggatgaggaaaccgcaaagaaaatgatctctttcttaaaggaaaaccgacttggacgagcaacgttccttcctcttacaagcgtagacggaaagggcaacttcaagaatacagatgccttaaaagagccgggtgtgatcggtcttgccaacacactggtaaaaacagaagcaaaatatgaaggtgtaaccgcatacctgctcggaagagtgatcgtcacagagaatatcgactatgcgatcaaacttgcaaagaagaatcattattccctgcatattgtcacgttagagggagagtacttaagcccgggtggttccatgacgggtggtgcattccgcaataacagcaatcttcttggaagaaaccgtgagattgaggaacttgaagaactcattggaaagtcagaacaaaagatcaaagaaagccgtaaccgtttagaggacattaagacagcacagagtctgctcgtggatgatatcgaagccaataaggcagaactacaggagcagctgattttacagaatacggcaaaaatgaatgtggatcgtgcagcggcgcagaagaacgaaagtgaaaatgtgtatgcagggctggttgctgagaatcaggaaattgaaaaacagttaaaagagatcaacgataacaaagcaaagatcttagaagagattgaatatgcgaaaaaccgcgaaatccagatcgaggaagataataaaaacttccagcagattttagatgataaaaatacgggtgtggaagcagccaccaacgcagtgtcacaggttacattagaactagccggcatccgccagaaggcagagttcgtacttgagaatatcactcgtatccaaagtgagatcaggcggtttgaggatgagcgcgagggcgtgttaaacgaagcaaagaatgccaaagcggatgtggagaagaagcgtcaggatatcgaggagatcagaaagacgatcttaaattcgtctgattatcaggaagaacaggagaaggctttaaaagagcatatccagaaaaaagaggagatgtctgcttcttataagggatttttcaaaaagcaggaggatgtttccaaacagatttcagaccttgacaaagagatttaccgtctgaacagccagagagaaaaacttgaggaagccggaaactaccagacgaattatatgtgggaggagtacgaacttaccctgcatgctgcgatggatttaaaaaatgaggaatttaccgatcttgcggatctgaaaaaacagattgcgtctatcaaagacgatatccggaagttaggcgatgtcaacgtcaatgccattgaagactacaaagagatctcagagcgttacggtttcttaaagggacagcatgatgatctcattgaggcagagaaaacattagtcggcattattgaggaacttgacactggtatgcgcaaacagtttatggaaaaatttgcagagatccagcgtgagttcgataaagtattcaaggaacttttcggtggtggaaaaggaacgcttgaacttgtggaagatgaggatatcttagagtgcggcatccgcatcattgcacaaccgccaggaaagaaattacagaacatgatgcagatgtccggtggagaaaaatcactcacagcaatctcactgctttttgcaatccagaatttaaaaccttctccattctgtctgttagacgagatcgaggcggctctggatgattccaacgtcagccgttttgcaaaatacttacataagctgactaagagcacacagtttattgtcattacccacagacgtggtacaatggcggcggcagaccgtctgtatggtatcacgatgcaggaaaaaggtgtctcgacactggtttctgtcaatctgatcgaggatgatttggataaataatatagaaacgaggaaaaagggatgagcgaagaaaaaaaaggcttctggagccgtctggtttccgggctgagcaagacaagggataatattgtttccggcattgacgcagtattcaatggattttccagcattgatgatgatttctatgaggaaatcgaggaaattctcatcatgggagatatcggcgtcaacgcaaccgaatccattattgagaatttgaagaagaaagtaaaggaaaaccacatcaaagatccggcagaatgtaaggaacttctgatcaacagtatcaaagagcagatggacgttggagagactgcatatcgttttgaaaatgagaaatctgtggtgctggtgatcggtgtcaacggtgttggaaagacgacatccgttggaaagctcgcaggaaaattaaaagatcagggcaaaaaggttgtccttgcggcagcagacacattccgcgccgcagccggaacgcagcttcaggagtgggcaaaccgtgccggagtggagatgatcggcggacaggaaggtgctgatccgggcgctatcgtctatgatgctgtggcagcagctaaggcgcggaatgcagatgtacttttgtgcgataccgcaggaagacttcataataagaagaatctgatggaggaacttcgtaagatcaaccgcattctggaaaaagaatatccggatgcattccgtgaaacactggttgttttagacgcgacaaccggacagaatgctttggcacaggcaagagagttcgcggaagtggcagatattacaggaattatcctgacgaaaatggatggaactgccaagggtggaatcgctgttgcaatccattcagaactcggtattccggtaaaatatatcggagttggtgagaccattgaggatttgcagaagtttgattccaatgagtttgtgaatgcattatttgatgtcaaggaggaaaaatagtgatgcttacattagacaagtttgaggaggcttcggaaaaagtaaaagaagtcaccacagagacaaaactggtttacagtgattatttcagccagcagacagggaacaaggtttatttaaaaccggagaacatgcagtttacaggtgcttataaagtgcgtggtgcatattataagatcagtacactgacagaggaagagagagcaaagggactgatcactgcatctgcaggaaatcatgcgcagggtgttgcctacgctgcaaaatgttatggctgcaaagctgtgatcgttatgcctaccacaacaccacttattaaagtaaaccgtaccaagagttatggtgcagaggttgtactttacggagatgtgtacgatgaggcatgtcagaaagcttatgagctcgcagaaaaagaaggatatacctttatccacccatttgatgatcttgccgttgcaaccggacagggcacgatcgcaatggagattttcaaagaacttccattagtggaatacattcttgtaccgatcggtggaggcggacttgcaacaggtgtttccacgcttgcaaaattattgaatccgaagatcaaagtgatcggtgtggaaccggcaggtgcaaactgtatgcaggcatcttttgcagcaggaaaagtaacaacacttcctaccatcagcacaatcgcagacggtaccgcagtgaagacaccgggaagcaagattttcccatatatccagaaaaacttagatgacatcatcacagttgaggatgacgagttagtagcagcattccttgatatggtagaaaaccataaaatgattgtggaaaattcaggacttttaactgtagcggcattaaaacatctggatgtgtccgacaaacggatcgtatccattttaagcggtggtaacatggatgtcattaccatgtcatctgtagtacagcagggactgatcttaagagacagaatcttcaccgtgtccgttctgcttccggataagccaggcgagctctgcaaagtttccggaatcattgcggcacagcagggaaatgtcatcaaacttgaacataaccagtttgtcacaacaaaccggagcgcagcagtagagcttcgtattacattagagtgttttggtacagatcacaagaaacagatcatcaaagcactggaaaaagaaggctataaaccaaaggttgtccgcaccagcttataagatttataagtattactaaattgaatcctgacagataatcgtatatgataattcaggtgatgctgtcaggtgaaaaaagacagcttccgatagaaaatatttttgcagtcaaagtgcagataagtcttgcaccagcagggcagaaaggatcataacaatgaaaaaaatagaagaatatgtaagaaccataccggattttccggaacccggcattatgttccgtgatgtaacaagcgtattgcaggatccggatggattaaagctggcgatcgattccatgatcaaactgttggatggagtagattttgatgtgatcgccggagcagaatccagaggatttatcttcggaatgccaattgcctatgcacttggaaaagcttttattccggttcgtaaaaaaggaaaacttccttgtgagacggtttcagcagagtatgatcttgaatatggaaaagcagagatcgagatccataaggatgcggtcagaccgggacagaaggttgtattagtggatgacctgatcgcaaccggaggaactatggaagcaagctgtaaattagtagagcagcttggcggagaagttgtaaaaatccttttcttaatggaattagcaggtttaaaaggtcgtgagaagctggcaaaatatgatgttgcctctgtgatcacatacgaaggaaaataaccttataaaatatgaagatgttatgcagtcacgtcaggagagactgcgactgtaaaatgatgtaagacaaagtgggagattagaaatgttagagaaaatgtttaaattaaaagagaacaatacgactgtgaaaacagaagtgttagcgggtatcaccacatttatgacaatggcgtatatccttgcagtcaatccgtccatgctcgcagcagcaggaatggataagacggcagttttgatggcaacctgtatcgcttcctttattggaacacttgcaatggcaatgcttgcaaattatccatttgcacttgccccgggtatgggattaaatgcttattttgcatacacggtatgtggcgcaatgggatatgactggaaaatcgcccttatggcagtttttgcagaaggtctgatctttatcgtgctctctcttaccaatgtgcgtgaggcgatttttaatgcgatccctaccactctgaaaaaaggtgtgagtgttggtattggtttcttcatcgcatttttaggtttacaggatggacatatcgtggtaaacaatgattcaacacttgtaacactcgttgatttcgcaggtgatttccacacacttggaatcagtgcgatccttgcattgatcggacttttcgtgatcgcaatcttatatatcagaggtatcaagggtgctatcttaatcggtatcgcagcaacatggatcttaggaatggcagctcaggctatgggactttatgttccggatgctgaggcaggattttattcattatatccggtatggggactgacagatttcacagctcttggacagacattcggacagtgctttaaggctgatttctctgtgatcagagtatttgattttgtggtaattattttatctttcttatttgtagatatgtttgatacattaggaacactgatcggtgttgcaaacaaagcacagatgttagacgagaacgataaacttccaagaatcaaacaggcattacttgcagatgcgatcgcaacaagtgcaggtgccgttcttggtacatcaactaccacaacatttgttgagagttcttccggtgttgcagaaggcgcaagaacaggacttgcttcagtcgtaacaggtttcttattcctgctcgctattttcttctcaccgattttctgtgcaatcccaggattcgcaacagcaccggcattgatcttcgtaggatttttaatggtgacgactgtaatctcaatcgactttacagatatgacagaggcaatcccggcatacttatgtatgcttgcaatgccactgatgtacagcatttctgaaggtatcgcgatcggcgttatctcttatgttgtgatcaatgtgatctgtggaaaagcaaagaagatcacaccattaatgtatgtactggctgtgttattcgtatgtaagtatatcttcttataaaagagtggatcagatgaaatatgttccatttattgtctgcgtgatattgtttatttttacaagcgcaggatattttatcacagataaaaaaatagaaaaaatatatggagtactttccattgcgagcattgcatgtgcgattgtgcaggcagcgattgtattttaaaagataaaggcagagaaccggatacccgatgaaaagttgggcgcccggttctttgtttattttgctgaaaattttcaaaggtattgtttctattattcaaatatggtacagtagcgttaatcagaaatcgaacaggcacaagtcagagtgcgaaaggctgctggaacagtcatatatttagaaacaaacaggattatcaacacagaccatatcggtcgtatatcccaatgattttaatttgataatgaaaaacagagtggtattggaactatttgtttttcctctgaaaaatcaggttacttaagaaggagaaaatgcctatgatttatagaaaagtaaatacgaacctttcggaaaccttagatgagatcggactgcagaaggcaaagcgggatgactatgccaagtgtattctggcagatccacaggtacttgcgagaattgtaaaaaatgtggtgacagaatttgagcaaatgtccgtggaagaaattattccctgtattggggagccgacagttacattgagtgtgccggaacttctcagtgtgaaaaatttaagtgtcggaacagaagatattgaagaagaaaacggaaaaatagtttacgatattcgatttccgttgtatcataaagaaaagacgatgaagtttttgatcaatattgaagctcagaaaagtacaaaggtttcgaaactcaaatatcacatagagaaccgtatgacctattatatttcccggatgatctcatcgcagaaaaatgtagagttcatcaattcttcttatgatgatttaaaacctgtatacagcatctggatttgtatggatacgggaaaggaagaagattccattattaaattaggactggaagcgaatgtgatatatggcaaaagtagatggaagcctgatttttcgctgataaacggagctattatcaggatccgtgaaaatgcagatgcagaggtatccaaaaacaaactgatcgcaatgctagagcttcttttttcacagacacccagagaaaccaagaaaaagaaactggaagaagattacgactttgtgatgtcgacagagatggaaggatgtgtggatgatatgtgtaatataagtgatctttttgaagaacaggtaacggaacgggttacagaacgagtgacagaagaggtcacagaacgtgtaacagaacaaaccctgattgccaaggtcgtgaagaaaataaaacgaggcaagaatattgcagagattgcagatgaacttgaggagacagtcgagacggtcacacctgtttatgaagcagcacttaaagctgcaccggattatgatgaggtagcaatctatgaggcactgaaaaaatagtcaaaagcaaaattacgggtgtcaagcaaaattcctttactgtaaagaaaaaatgcttgacacctgttttgttttatgttatcttagcaaaggtgccgatgtatgaatagtagaataaaggcatggtgtgaggaatggaagaaaaaatcgaacaggcttatctctatgacttctacggagaactgctgaacgaacaccagagaagaatctatgaggacttcgtgttcaatgacctttcccttggagagattgcaaatgaagaaggaatcagccgacagggtgtgcatgatatgatcaagagatgcacgaagtctctggaaggatatgaggagaagcttcatctgatcgcaaagtttcaggcggcaaagcagaaggtcgcacagattgatgcgcttgcgaaggagtttcattctagtcacaacgaagcgattatggaggaaatcgaacagatttccaatcagattttagaggagctataagatggcatttgacagtttatctgaaaaacttcaaaatgtgttcaaaaacctgcgaggcaaaggtcgtttgacagaggatgatgtcaaggcagctttgaaggaagttaagatggctcttttagaagcggatgttaacttcaaagtcgtaaagcagtttgtaaaagatgtgcaggaacgcgcaatcggacaggacgtgatgaacggactgaatcctggacagatggtcattaagattgtaaatgaagagatggtgaagctgatgggctctgagacaacagagattaagcttcagccgggaaaagcattgacagtcattatgatggaaggtttacagggtgcaggtaaaacaaccaccgcagcaaagcttgcaggaaagtttaagctgaaaggaaagaaagtattactgactgcctgtgatatttaccgtccgggtgcgattgaacagttacagatcaatggtgaaaaacagggcgtggaagtattttccatgggtgataagatcaaacctgtaaatattgccaaagcagcaatcgagcatgcggcaaagaatgaatttaatattgtaatccttgatacagcaggacgtcttcatattgatgatgacatgatggctgaattgcaggagatcaaagagaatgttatcgttcatcagaccgttctggttgtggatgccatgaccggacaggatgcagtgaatgtagccaagatgtttgatgaaaaggttggcatagatggtgttatcttgacgaagttagatggtgacaccagaggcggtgcggcactttcaatccgtgctgttaccggaagacctattttatatgtaggtatgggagaaaaactttctgatctggagcagttttatccggacagaatggcttcccgaatccttggtatgggcgatgtgctgacacttattgagaaagcacaggctgatattgatgaggagcaggctaagcgtatcgaacagaagatgcgcaagaatgagtttgactttgagatgtatcttgaatctatgagtcagatgaaaaagatgggcggattatccagtatccttggtatgatgcctggtcttggaatgggaatgggcaaaggtaagatgcctgagattgatcaggaagcagccgagaagaatatggcgcgtaccgaagcaatcatttattccatgacaccggaagagagacgtaatccgtcgcttatgaatccgagccgcaagaaccgcattgcaaaaggtgcaggagtcgatattgcggaagtaaaccgtctggtaaaacagtttgaacagatgaaaaagatgatgaaacagatgccgggcatgatgaaaaaaggtaaaagaggaatgttcaaagggcttcctttttaataaatttttagcaatcacgtaggaggtgaaatgacatggcagtaaagatcagattaagaagaatgggacagaagaaagctcctttctatagaatcgtagttgcagattccagatccccaagagatggaagatgtatcgaagagatcggaacttatgatccaacaaaagatccaagcgaatatcatgtaaatgaagagttagcaaagaaatggttagctaacggagctcagccaacagatacagtagctagaatcttcaaaaatgctggaatcgaaaaataagattagtgaggtggtctaatgaaagaattagttgaagtaattgccaaatcactggtcgatttcccggacgaagttgttgtgacagagaccgagaatgaaaaagccattgtgttagagttacgagttgcgcagtctgacatgggtaaggtaatcggcaaacagggcagaattgcaaaagcaatccgcgccgttgtgaaggcagcagcctcaaaagaagagaaaaaagttattgttgagattatgcagtaacatgatgggctatcccagttgtctggggtagctttttccttataaaatattttacagaaaatctgtattgttttaatataaaatgcagctatccgtttatgattcggatgacagaagaaagttcagtaaggagattacatggaagatttattgcaggtaggtgtcataacaaccacgcatggtgtcagaggagaggtcaaagtatttccgacaacagatgatccggcaagatttaaaaagctgaaaaatgttgttttggatacaggcaaagagatgatcgaccttgaggttgccggcgtaaagtttttcaaaaacatggtgatcgtcaaattcaaaggtattgataacatcaatgatgtggaaaaataccggaagaaaagtctctacgttacccgcgagaatgcggtaaaacttaagaaaaacgaatactttattgcagatctgatcggattgtcagttgaatctgatgagggtgaagatttaggcgaggtgagcgatgttcttcagacaggtgccaatgatgtatatgttttgagcaaagaggggatggatgatattctgcttccagcaatcagggaatgtgtgaagaatgtcgatttagagggtggaaaaatgacagttcatcttttaccgggacttcgcgaactgaatgaaaaatgatccggtatgaaatgtcatgcgactgattaaaaaaccaaaggttttttgcacacaatagagtagagaaacaggagttcacaaagaatgaattttcatatattaacattatttccggatatggtaatgcagggactgtctacaagtattattgggcgtgccaaagagaaaggactgctttccattgaagctgtgaatatcagagattatacattagaccgtcacaagaaggtggatgattatccttatggaggcggcgcaggtatgcttatgcaggcacagccggtgtatgatgcatggatgtctgttgtgaaccggatcgggtataaaccgagaacggtgtacctgactccgcaaggaccaacatttacccagccaatggcaaaagattttgcgctggaaaaggatctgattcttttatgtggtcattatgaaggaatcgacgagcgcgtgttagaggaaattgtgacagattacgtttccattggcgattatgtgctgacgggaggggagcttcctgcgatggttatggtagatgcaatctcgcgcatggtgccgggagtactcacgaatgatgaatcgggttccacggaatcctttgagggtaatctgctggaatatccgcagtatagccgtccggaagaatggatgggaaaaaaagttcctccgatcctcttgtccggagatcataaaaaggtagacgaatggcgacgcgaacaggcgattttgcggacgattgagcgcagaccggatctgctgaaaaaagcagaacttacaaagaaagagcagatgaaatatcaggattatctgttgtaaaatgtgaaaaacgcttgacttttttgtgaaagcatggtaaagttaacgagttgtgaataaacgagatggtcctctgttacgaataggcgtattaagaacatccaaataataggaggtcacaaaatgaacgcaagtgaaattattaaaagcattgaagctgagcagttaaaagctgaagtacctgaattccgtgttggtgatactgtaaaagtttacggtaaaatcaaagaaggaaaccgtgaaagaatccaggttttcgaaggtgttgtaattaagagacagggtggaagcaaccgtgagacattcacagttagaaagatttctaacggatgtggcgttgaaaaaacctggccattacattctccaaacgttgagaaagtagaagttgttcgtgctggtaaagtaagaagagctaaattattctacttaagagaccgtgttggtaagaaagctaaagttaaagaattagtaaaatagttcaatgcatgcgtaagccatagagagagtagccgctttttctatggctttttcttttgccgttttttcttctgttttggtagtataaaataaaaattaaacaaaaatagttacataatagcttgaaaaaattggtaatattatatattgacaattttttcaagggggggg

SEQ ID NO: 14398 - DNA, 48616 bp, Unknown
  gut microbiota DNA sequence
gtagtattatctatggtattgtgcttgggagcaagcgtaacagcatttgcagcggaaagcccgtctgccaataattcaagtacatctacaacaacatcacagacatctacaactacaacttcaacaacagcagctacagaagtaaaagttgagcagaaagcaatcacacaggatgtattgaacgatgttcagaaagaaaaattaggtggatatttcacagatatgacagcaattgataatgacacaacattgacagctgagcagaaagttgagaaaaaagcagccgctgtacagacaatgatcaatgaagttttaggtttgaattattcttataagagtggcgtatatggaacatatgagttaacagcaactgatttatcaaatccaattgcaatctctgttgcaggaattaaagctggcgatactgtagttgttgcccatcttacatcttctggtgtatgggaaaatgtacctataacaaatgttgcagacggtgttgtatatgcgaaatttacatccctttccccagtatttgttgcttctgtaacagatacaaatgcagcagcaacttcaccaaaaactgctgatgcaggaatgaatatggcaatgatccttgtagttgtgatcgcagcaacaggagctgttgtatatgcaagacgcagaatgaactatacaaaataataaagaatataattataaatctgaggaaggctatatgtcattgtggcatatagcttttctttgttttgggtgaaagagatgaaagaacaaataaagaaatatcaaaaaattatttttctgattggcatatttgggatattcgtgttactattttttctggtaaggtataaaggaaaaaagaatctggaagcaaatattgcggcagaacagcaggatgtctttgaggagatggcgtcttttcggaatgtgattgattatcatggaacaacataccaatacagaaaagatatcgtaaatattttatgtattggcgtggacaaagaagaggcaatgtgggaacgtgatgatgatggcggaagtgtcgggcaggcggatgcagtctttctggtttcccttgattttgaacattccaatatacgtattctggcaataccgagagatacaatggtgagcattgtggcgtgtgatgaagatggaaatgaaatgggtgcgtttaccgggcagcttgcattgcagtatgcgtatgctgacgggcaggaaaaaagctgttcactggttattggacaggtggcagatgttttaaaaaatgaagtgccgatcaatggatatgtcgcaatgaatttaagctgtataggaatggtgaatgatgcagtcggcggtgtcacggttgagatggatgatgattataccttatataatgcaaagttcaaaaagggtgcgacggtgcatttgcagggagaagaggcgcaggagtttgtgcagggaagagatatcacggtaagcggcagtgcatatagcaggattggacgacagaaaagatatttaaaagcatttatcagtcaggctaagaaaacgttaacacagaaccccacattggcagtaaacctgatgagccagttatcagactatatgttgacagatatttcaacggacgaggtgctatatttatcgacagaactttcaggctgtaattttgatgaggaaaatatgcagattttacagggaaatatccagatgggagaacgatatgaagagtattatttagatgacgaggcagtacagcagacaatcatcgatttattttacgaggagcagaaataaatgagtacattgcgggaaaagaggaaaaaagaacggagagcattaaggcggagaaaaacagctgattggacagttgtgctgatactctgtgccatcgccgtgtgttgtggaggctatctggtctatcatcactggagtgtgaaacagcgggaattagaatatgagaaaatgagacaggaagaagcgttaagtgctgcaacagagacggttatcgcagagccggagacagaggagagcacagaagaaacagtgatctactgtgatccggtctatgatttcggacagctgcatgaacagaatgaagatatttatgcgtggatcgtcgtgccgggaacgcaggtggattatccggttttacagtcagagacagacaattactatctggattacaatttggatcacagcaagggttatccgggctgtatttacacaaataattgcaaccagaaagattttaccgattataataccattttttacggacataacatgaaaaatggttccatgtttggaagcattcacagtttcgaggatgaaacgttttttgaggaacatccttatatctatgtgtatacagaaaacgaaagacttacttatgaaatctacgaagcagcaaagtttacagacgtgtatattccggcacaatatgtgatcaacagcagggaggacagagatcgttttttaaatgatgtgaaggagacggtgtcagacaataaactgcatgtcagaaaagatttagaagtcggggaagatgacagacttatcacactttccacctgtgtcaacggcgagcggaatcatcgttatctggtgatcggggtacttgttgaaacggcagtttaccagtaaaaggacggaaggatgcatttataaaatctggaaaatccgattctcgaattgcgcacaatcaagctttgtggtaatctataacatgtattatttgcggacaacagagcagaggaaaacaaaagtgagaagaaaaagaagcggattgaatttcggaagaagaaagaaaaaagtaaacatgacgatcgtgaaagaaatcttaagctggacagttgagattatgatcacgcttgtcattgcgtttacgtttgtatattttatcggattgcggacgagtgtggtagggcagtcgatgtcagaaacattagaaagcggagatgagattttagtgaacagatttatctataaagtatcagatccgaaaccgaacgatattatcgtgtttctgccaaatggaaatgaaaaatcccactattatgtcaaacgtgtgatcgctgttccgggagatacggtgctgatccagaatggtgcggtttatgtgaacggcgaactttttgacgagaaggtggatgtgtctgcaatcgaggaggcgggacttgcttcagagaaaatgaagttagaggatgatgagtattttgtccttggagacaaccgtaataacagcgaggacagccgctatgccaatatcggaaatgtaaaaaaagactacattatcggcaaggcgtggttctgcgtgtctccatggaaaaaatttggatttttataagaaggaaaagtgaggaaaaaatatgcagtttcagtggtatccgggacatatgacaaaggcaaaacgtcagatgcaggaagatataaaattaattgatctggtgatcgaacttgtggacgcgagaatcccattaagcagccggaatccagacattgatgagttgggaaaaaacaaggcgcggctgatcattatgaacaaatcagatttgtcggatgaaaaccagaataaagaatgggcagcttattttaaaaagatgggttactatgtcgtcggtcttgatgcgagaacgaaaacaggcatgaaaactgttacaaatgtagttatggaagcctgcaaggaaaaaatcgaacgtgacagaagaaggggaatcgtgaaccgtcctgtccgtgcgatggttgtgggaattccgaatgttggaaaatcaacttttatcaattcttatgccggaaaagcgtgtgcgaagactggaaataagccgggtgtcaccaaaggaaaacagtggattcgtctgaacaagaacctggaattgttagatacccctggaattttgtggccgaaattcgaagatcagatggtaggtctccgtctggcgctgatcggtgcgatcaaagacgaaattttaaatattgatgaattgtctctggaactgatcaaggttttgacgagagattatgcaggtattttaaaggagcgttacggtgtggatgagtccgaaacgcctgtgaagattttagagcagatcgcagaaaaccggaagtgcatttccaaaggaaatgaattagattacagtaaagcagcagcacttttgattgatgaattccgcagcggtaagcttggaaaaattacattagagagaccggatacagaataagaaatggaaagatgttagaaatggatacatttcttgtgtgaaaacgtggataaaaggcggcaggtaacatgacagagaaaaaaatcggtgagatcaaagaagaacttaaggcagtggaggatgagaagctgccttcttttatacagacatatgaaaatgatgagcgttccggcgttgtgaaaatagttgaacaggcaaaaaagcgtctggaaaaattagaggcagagaagcttcgcattgaaaatctgaaaaaatatgagtatgaatatgcagattgcggttatatctgcggaatcgatgaagttggcagaggtccgttagctggtcctgtagtagccggagcagttattttgccaaaagattgtgatattttgtacataaatgattccaagaaactttctgcggcaaagcgggaagaactgtatgatgtgattatggaaaaagcggttgctgtcgggattggaatggcaagtccgcagcggatcgacgagattaatattttgcaggcaacttatgaggcaatgcgtgaggctataagcaaattaagtgtaaaacccgatatattattaaatgatgcggtaacgattcccggagtttctatcagacaggttccaatcatcaaaggagatgcaaaaagtatttccataggggcagcaagcattgtcgccaaggttacaagagaccgtctgatggtcgaatacggtaaaatccttccacagtatggttttgcttccaataagggatatggatcagcggagcatattaaggctttgcaggaagttggaccgtctccgattcatcgtgccagctttatcaaaaattttatctgagagatactgtggttttatgctgcaactctttgttttggaaaagtacagtaagcaaaaagcatgcaggaagtgaggcggaattatgcacatatccgatatgttaggacaatataaccggaatgtttcaagcggaacggaagaattaaaagcagcttccggtatgcagaaggtagtgtctactttggaagaactgtcttccggaagcgtttttgagggaacggtcagttctgtaaaaaatggaaaagtcacactggcattgagtgatggtcagacaatctcggcaagattgtctggaaaagtgcagctttcgcagggaacccccatgttttttcaggtaaaaagcaatgatggcgagacaattgagataaaaccttacacaggcgcaggcagtggtggaaatccgattcttaccaatgcgctggcagagggaaatgtaccggtgacggagcgcaatcttgcgatggttgacgcgatgatgaaagagcagatgccaattgataagcagagtctgatgaacatggcaaggattgccaatatgaatccgggggtagatgtcactacggttgtaaatatgataaagcttgggattcctgtttccacagaaatggctgcgcagtttgaaaattatatgacggatcagcacgcaattttgcaggagatggatcaggtaatgaatgatcttgcaaatcttgcaggttcagatagtctgacaccggatcaggcagtgcagctgaaccagaaaattgtatccattttacttccagagcagatctccggtggagagaatgcgcccgaaggacagacggtggcagacagtgagaatacgtcaggcggacaagttattactggcggagagaatataacagacgggcagagcacgattagtagtgcggacacagtaaatggtcagaacgttatagacacacgtgcacccggcacagagacatctggcacacagacaatggcaggagaaactcagcagacatcagcagcaacggcagcacaagacgctgcaatatctgctggcaaccagacattacaggacgtcctgtcagaacagcagttgtctgacttcggaaagttgttagagaacattccttcgctggtggaagatacaaaactttttccggaagatatggaacaggagatctttatcaatacattggaagatgagagtgtggcgcagaatctcatggcggaggacactgtagggaatctggagaatggtggatcggctctgaataagaatctgaccgtatctgattttttgcgcatagtatcacagattctgtcagaaaacagtgaggcggcatccgcaaatgttcaaaaactttttggcagcagggaatataaaagtctgcttcaaaatgtcatggagcagcagtggctgataagaccggaagaattgaaagaagagaaaaaaatcagccagctttatgaaaaactggaacagcagatgaaacaggtggaagatgtcttaaaagaagccggaatgaccaaatccgcttttttggatactgccacagaagtaagaaacaatattgaatttatgaatcagctcaatcaggcatatacttatgtgcaggtgccgctgaaattatccggtcagaatgcaaacggtgaactttatgtttatacgaataaaaagaacctcaaagatccggatgcggaactgagtgcatttttacatcttgatctcgaacacctcggttctacggatgtctccgtgaaaatgcagcaccgtaaagtgaagacgaatttttacatggcagatgatgcgtcttatgatctggtggagaagtatcttccggttttggaacagaaactgaaagaaaaaggttatcagtgcacaataacggtgacaaaggaagaaaagaaggtaaattttggagatgattttctgcgaaaagatatgccgcagacgggaacactgcatcgttattcttttgatgtgagagcctgatgaagacagaggtggtgagcggatatggcatggaatctggaaaagaaaaaagtaaaaactgcggtggcagttgcctacgaacctggcgataaagcaccgaagatccttgcgagcgggaagggcgagatcgcagaaaaaatcattgaaaaagcaaaagagaatgatatccctttttataaggataataaacttgcagaaacactttccaaattagaaataggggatacaatcccaccggaactttatgaggtggtggcggagatccttgtgtttgtggatgacatggataagatgaaagcaaagctgcagcaggcagatatgctttcttaaatgcaggaaaagtaatagcagatacaaaaaaatcgggttttgcggaaaagaggtttctattaataagagaagtgttggggctgcttatgaaaaactggcgggtgcgtatttagagcagcaggggtatgagattttagaatataattacagatgtcgtatgggagaggttgacattgttgcaaggcagaatgggtatcttgtgtttgtggaggtaaaataccgcacagacggtggaacaggaaatccgcttgaggcggtgacacctgcaaaacagagaacgatatcaaaggtagcttcctattattgcctgacacatggatatggcatggacacttcgtgcagatttgatgtggcggcgattctggggaaaaagatcaaagtgattcagaatgcttttgaatatcagggtttttaattgcagaaaaaaacaggagaaatgtaattagaaaatattacagcgtatgaaaatggaacataattggaaaagaaagaatcagacaggcgtaccggttgaggtcattcatcagacgaaatccggtgtggaagtgccgcttttacatttcccttcgctggaagcgaccggcatcgtaaaagagggattcaccacaagacttggcggagtcagtgaagatattttttctaccatgaatttaagctttaccagaggagataacgaggaagccgtccgggaaaattacagaagacttgcattggcacttgatgtggactatgataaattcgttttttcagatcagactcacacaaccaatgtcagaaaagtgacaagtgaggatgccgggaacggacttaccagagaacgccagtttcagaatatagacggactcatcacagatgtgccggggcttgtgctgtcaacattttatgcggattgtgtaccgctttattttgtagatccggtgcaccgcgcaatcggtttgagccattccggctggcgcggaacagttaaccgcatgggaaaagtgaccattgaggcgctgaacagagaatacggcagcagaccggaagatctgtactgtgcgatcggaccgtctatttgtcaggactgttacgaagtgagcgaggatgtagcagaggaatttaaaaaggcatttgcaggtcacgaaagcgaaatccttatagataagggaaacggaaaataccagctcaatctctggaaagcaaatgagattgtgctgctggaagcaggtgttttaccggaacatcttgcaatcacagacatctgtacctgctgcaatccggatttactgttttcccaccgcgcaagccacggcagacgcggaaaccttggcgcatttttatgcctgaaaacaaattagataaaggagcaaaagaacatgagcaaaaattatgtagattatatcgtagaggaaaccaaaaatatccttgcaatcgacagtccgtccggctttacaaaagaggtggcagattatgtcatgggagaatacaaaaagcttggctatgaaccaaagctcacggtaaaaggcggtgtgcttgtaccaatcggtggaaaagacaaagaaaacgctgtacttttagaggcacatattgataccttaggtgctatggtcgctgaaatcaaggcaaacggaagactccgtgtgacagcagtcggcggcatgaatgccaataacgctgagggagaaaactgcaaagtcattacccgttttaacggaaaatacgacggaacgttgcagcttatcaatgcgtctattcatgtaaacggcgaatataatgacacaaagagaagctatgattctgtggaagtcgttctggatgaaaaggtgaaatccaaagaagatgtggagaaacttggtatcatgacaggcgattttgtctgctttgatccgagaacaactgtgacagaatccggttatatcaagagccgcttcttggatgataaattaagcgttggtattttattaggttatgcaaaatacttaaaagaggaaaatgtgacaccggaccggatgatctaccagcacattaccgtatttgaggaagtaggacatggcggagctgcttccattccggaaggtgtaacggaagttatctctgtggatatgggctgcgtcggcgacggacttgcctgtgatgagacacaggtatcaatctgtgcaaaggacagccacggaccatatcattatgatgtggtaaatggactggtaaaggctgcaaaagagaacaatattgattttgcagtagacgtgtatccatattatggatcagatgcagatgttgcgctgagcgccggatatgatgtgcgccacggactgatcggttctggcgtttatgcctcccacggttatgagagaagccatgtggacggcgtgaaaaatacatttgaactgttgaaagcatatcttggataagaaaatgcagggaaaaccagtatattttaaataaatcttaataatatcctaggattatcttcattgtaataacaaacctcccatgatatattaactgtatgaagaatgatagtacacatcatacagctaatacagatgggaggtttgttatttgattcagttaaattacagggatgcaaaaccaatttatgaacagatcaaagacggtctgagaaagctggttatcacgaattcccttattgcaaatgaaaaactgccatccgtgagggaaatggcatcaaagcttgcaatcaatccaaacaccatccagaaggcataccgggaacttgaggcagagggatacgtctataccgttgccggaaaaggaacatttgttgccgagcggaaagaagtgctgggtgtcagaaatgaagaactgatgaaagaatttgatgaggtggtaacggagctgctgtttctgtcagtggatgagggcagtttgaaaacacgtattgaacaattggctgaagggggagaggcatcatgattcaggttcataatctgaaaaagaaatttgacgattttcaggcattaaacggcgtggaaatgcatgttggaacaggcgaaatttatggattggtcggaccgaacggagcaggaaaatccacactgatccgtcatctcaccggagtttataaagcagatgaaggagaaatattgatcgacggtgaaccggtatttgaaaaccgcaacatcaagcagcggatcgcttatataccggatgaactgttttatttcatgcaggcggacaccatggaaatgaaacggttttacgaaggaatctatccgcagtttgacagtaagcttttttacaaaatgcaggaatttttcccgacaattgatgtgaagcgcaacatcagacgattgtcgaaaggaatgcagaaacaggtggcattctggcttgcaatctgctgcaaaccggatcttatgatcttagatgagccggtggacggacttgatccggtcatgcggagacagatctggagcattttaatggcggaagtggcagagcggaaaatgacagttttagtgtcttcccataacttgagggaactggaggatacctgtgaccacgtgggaatcatgcatcatggaaaaataataatcgagcggtctttgagtgaccttcagggaaacatttccaagatacagatcgcatgccagagtggtgtgccaaaattgccggataagtttgaggtgttgcatatggcaaatacaggacgtgtttacacactcattgtaaagggtgatccaaaagaggcagagaaaattctcctgacagaaaatcctaccattgtggatgtacttccattgacactggaggaaatctttatttatgaattgggaggtgtggattatgaagtcaaagacatcctgctttaataaaacgatttttaagaaaaatatgacgcacttctggccgttgtgggcattgtacagttgttatctgatcgtttcgcttccggtcggactgtggtttaatatgcggtattatctgctggatgacagttacagccagatccagagacaggcctatgcgatcagcggcgctatgcgggcggccatgaatccggtgatcacatttgcatttgcagcagtgatgatcatggcagtgttttcctatctgtattctgcaaagaatacaaatatgatccattcgcttccggtggacagacgggagctgtttgtgacgaatatcatatctgcgtttgcatttatgatcattccgcagatcctgacctttattatcacggtgtttgtctgcattggcacacatatcaccaacatccagtacattttatactggtttggtgcagaagccgcaatgacgttttttgcgttggcgctcggcgcatttgtggcgatgtttaccggacagctcatggcatttccggtgtattatgtcgtagtcaattatctgtatgtaggatgctggtatctgatcaacatggtgatagagagtgtctgctttggtgtgtcaaacaattggaatccgggaaaatcctgtattttgtctccaatttattatctgacaaacaatctgcggatacagtcggtagaaaacagcgaatatgtgacggttggaatcgaatttaagggggcatatctgctcgggatttatgcagtggcaggtgttgtattcctgatcgcagcttatcagttgtataaacggagaaaattggagactgcgggtgaccttatcagcatgcgggggatcaagccggtgttccgctggggcgtggctgtctgcgccggtctgcttggaggaaatgccgttgctgacacgatcggaaacagtttttcttctgcaaaggtacatttttggatacttgcagcaggcacactgatctttggtgcgatcggtttttttgtggcagagatgcttattgagaagaatttccgtgtgttccacaaaaagagagttggggaatgggcagtcttaacggttgttctggcagcatttctgggtgcactcaaactggatatattccggatcgaaggaaaaataccggatgtttcagaggttaaggtggtatcgctcaatctggactacacgctccgctataccgaaccggatgatattcagaagattatagatctccagaaagagatcctggcacagaaagaagagtgcctgagcgcagagaaccaatattatctctcaatcacatataccctgaaggatggtaagaagctgcggagaagttatacagttccggttgggcaggatgcggctgcggacaaagattctgtcgttgcaaaagtgactgcgttagagagtgatccggataagatgatgcagaacatgtttggcaattactataagacgaatgagtattatgccggcagcatttcatttgtagatgagaacggcagaacagaggattaccgttttacacaggaagaacttgacgctgtcatggaggcggtgcaaaaagatgtggaagcgggaaacatgacgtactatgaactttattcgctccgtgccggtgatgaggataacacgtacagggatcgttattttaacaatctggatatcagtttttataatccggacggtatcatctggaattacagttcttacagtgtggatggggttgatgtgacagaagcggtgctgacaggggagaagactgcagaagaggcagaagcttatttcccaaacagtgacagcgcctatgttgagtttggaagcaaatgcacaaacattattgagacattgaaaaaacttgggattttgaacagtgagcgaaaacttatgacttatgatgagtatgacgcactgatgaatccggaaatggcatagttttgaaaaaagatggaataaatattgttattccatcttttttattgtaaactgttattgttatttttagcgtaacggtagaaagccatttaaggttataacaggaaagtagtgaagattccagttctttccgtgatacatgagaaaaggagttttttaaatgagtaaaccagtcgtagcgattgttggacgaccgaatgtaggaaagtctacattatttaatgcactagcaggtgaacgtatttcaattgtaaaagatacaccgggcgttacaagagaccgtatttatgcggaggtgtcgtggttagaccacaactttaccatgatcgataccggaggtattgaaccggacagtcatgatatcattttatcccagatgagagaacaggcagagattgctattgcaaccgcagatgtgatcattttccttgtggatgtaaaacagggattgcaggattcagattcgaaggtcgcagatatgctgcgccgttccggaaagccggttgttctcgttgtcaataaagtagacagctttgaaaagtatatggcagatgtctatgagttctataatcttggaatcggagatccattcccggtttcggcagcttccatgttaggacttggagatatgttagatgaagtggtaaagtatttcccggattataagaaggatgacgaggaagacgaccgtccgaagatcgccattatcggaaaaccaaacgtaggaaaatcttccctgatcaataaactggcacaggaagaccgtgtgatcgtgtcagatatcgcaggcacgaccagagatgccattgatacggatattaagtacaatggaaaagaatatgtatttattgataccgcaggactgcgccgcaagaataagatcaaggaagagatcgagcgctacagtatcatccgtgctgtcacagcagtagaaagagcagatgtctgtatcattgtaattgatgctacggaaggtgtgaccgagcaggatgcgaagatcgcaggaatcgcgcatgaccgtggaaagggaatcatcattgcagtgaacaaatgggatgcgatcgagaaagacgataagaccatttaccgccatacagagcggatccgtgatgttttaagctttatgccatatgcggagattatttttatctcagcaaaatccggacagcgtctcaataagatttttgagacgatcgatgtcgtgatcgagaacaacagcatgcgtgtggcaaccggtgtattgaatgaaatcgttaccgaggcagttgcgatgcagcagccgccatcggataagggaaagagactgcgtatttattacacgacgcaggtttcagtaaaaccgccaacctttgtgatctttgtgaatgataaacagctgatgcatttctcctacacaagatatctggagaaccgtatccgtgatacgtttggattccggggaacagcccttcgttttatcatcagagagagaaaggaaaatgaaaaatgatcatcgccaggataattgcagtagcgatcggctacgcctgcggattatttgaaacaggttatttttatggaaaaaagaaaggtgtggatatccgcacaaaaggaagcggcaattccggtgcgacaaacaccttaagaacctttggctggaaggcaggacttgtgacctgccttggtgatattttaaaaacagtagcggcagtgttagccgttaaactgatctttggaagaacatatacagaagacatcattcttctggagctgtatgcaggttttggagcggtgctcggacacaattttccgttttatctgaagttcaaaggcggaaaaggagttgcatgtaccggtggaatggtgcttgcagtatttccgatcgttgcaccggtcagtatgggactttttctggtgatcagcgcagtgacaaagtatgtatctctcggctcaatcatcggactgatcagtgtttttgtccaggtggtcatttacggacagcttggaattatcacagttccaatgggaatccgtgcggaattttacatagtgacagcctgttttaccattttaggggtatggcagcaccgtgcaaatatcagacgtcttgcaaatggcacagagaataagatcggtgcaaaaaagaaagagcagaaataattttttgatttggagtgagaaaaaatggcagatgttgcgatcataggagcaggaagctgggggatcgcccttgcaaaagtactgcataccaatggaaataaagtgacagtgtggtcgatcgtggaagatgagattaccatgctgaaggaaaaacatgagcatatacagaaacttccgggggtaaaactgccggaagatatggaatttacaacggatctggaatctgcggtttcaggtaaagcatacctgatccttgcagtgccgtctgtattcacaagaagcacagcaaagagcatggcgccttttgtgaaagagggacagatcattgtgtgcgtggctaagggaattgaggaagagacactgatgccgcttactgacattgtggagcaggagatcccgcaggcagaggttgcggtgatgtgtggaccaagccatgcggaagaagttggaatcggacttccgactacagttgtagcgggagcaaaaaaacgtgttgttgcagagggaatccaggatattttcatgaacaacgttttccgtgtgtatacaagcccggatgtgcttggcatggaacttggcggttcgttaaagaacgtgatcgcgctggcagccggaatggcagacggtctgggatacggggataatacgaaagcggcacttatcaccagaggaatgtttgagatgaacaaactcgctgtgacgatgggtgcaaaacaggagacattgaacggacttaccggaatcggtgatctgatcgtgacctgtgagagtaagcacagccgtaaccgcaaagccggaatgctgatcggacagggttacaccatgcagcaggcgatggacgaagtgaaaatggtcgtagagggtgtctactctgcgaaagcagcgatcgcccttgcaaaaaaatatggtgtggatatgccgatcattgaggaagtcaacaaagtattatttgaggataagccggcaaaagaggcagtcaatgacctgatgctccgcgataggaaaatggaacatggcaatctggaatggaggatataaatgaagatcaatataaaaaaacttgatgcggatgcagtactcccgacaaggggaagcagtcaggcggcaggctatgacctgtatgcaaaaagctctgaggatactgtgatcttgccacataaaacagtgatggtcggcacaggacttgcgatggaaataccggaaggatattttggtgcgatttttgcaagaagcggtcttgcctccaagcagggactgcgtccggcaaattgtgtcggagtagtggattctgattaccggggagaatttatgatcgccttacataatgatacggatgaggagcgtgtgatcgccggaaaagagcgaattgcacagatggtcgtaatgccgtatctttctgttgagtttgaggaagtagaaacattgaatgagacagagcgcggggaaggcggatttggttctaccggaagaagataatatccggcaaatgccggaatagtgggattaaggaggtattttattatggaaagcagaatggtaaagttttattcaaaagagagcaatatggtagcgattcatgcaattccgggacattttgcaaccagtcattcccatatcaattactacattgatatcacaagcctgaagacaagaatccgggaagcaaaagaggttgcccgcgtgttgtatcagaagatcggcagagtttcctatgtggatacaatcgtatgtatggatggtacggaagtgatcggtgcatttttagcggaagagtttgaaaaaggagatatggcatccacaaaccgccacgagacgatatacgtggtttcaccggagatgaacagcaataaccagctcttgttccgtgataatatcaaaccaagtattgcgggaaaacatgtggtcttattatctgcatctacaacaaccggaaagacgattcacagaagtcttgagggaatccgttactatggcggcgtcattgaggcagttgcctctgtgttcagtacggtatccgagatggatggctttaacgtacattctgtgttccatgcagaggatcttccggggtatgcagcatattccgcagatgactgtcctttctgtaaaaagggaatcaaactggatgcggttgtgaacggatttggatattcgaagttataatccggagtgaaaatgatattgcatgatgcggatgcctgatctgacagaaagtataagaagaaagcttcgtcaaattgacggaaaaagatgaaatatcagtgcaatctgacgaagaaatcaaaaaacagtcaaaatcactgtgagttcctacaagaaatcgacagattctttgtgtaggtaacatatggtgttttcggctgtttttttgtatagtaaatatatcaagaaacgaacaatttattaggaggtatttacaccaatggcaagtttatcattaacaaatgtatgtaaagtatatcctaacggttttgaagctgttaaggatttcaaccttgaagtagaagatcaggagttcatcatcttcgtaggaccatccggatgtggtaaatctactacacttcgtatgatcgcaggtcttgaagagatttcttctggtgaattaaaaatcgatggcagagttgtaaacgacgtagagccaaaagacagagatatcgcaatggtattccagaactacgcattatatccacatatgactgtattcgataatatggcattcggattaaaattaagaaaagttcctaaggatgagattaagaaaaaagtagaagaagctgctaagatccttgaccttgagaaattattagaccgtaaaccaaaggctttatccggtggacagagacagcgtgttgctatgggacgtgctatcgttcgtaatcctaaggtattccttatggacgaacctctttcaaacctggatgcaaaattacgtgttcagatgcgttctgagatcgcttccttacataacagattaaaagctacaatcatttatgtaacacatgaccagacagaagctatgacattaggtaccagaatcgttgtattaaaagatggtgttatcatgcaggttgattctccacagaaattatacaatgagcctaacaacttattcgtagcaggattcatcggatctccacagatgaacttcattgatgctgtatgtaaagtagaaggcgagagagtaactcttaacttcgagaagacatctgttgttcttcctccagcaaaagctaagagattaatcgatggcggatataacggaaagacagttgttatgggtatcagaccagaagatatcggagattcccagattgagatcgaagctcacaaagatgcagtattcgagacagatgtaacaggatacgagttattaggttcagaagtattgttatacttcaatgtagcgggaacagccatgacagcaaaagttgattccagaacaacagctcgtatgggtgatcatatcacattagcgatcgatccagagaagattcactgcttcgacaaagaaactgaattgacaattaccaactaattcggtaaaacagactaaatgggaccgggtacagtatttgtacccggtttttttatgatgttgccattcactgattttttgtgtatgatagcataggaaaaaagtgttaagttttataaataacgattgcaaaacaaacatgtgttctatataatgaataacgaaaggaatggggcgtatgatatcaaaccataagatacagactgcgttagatgagatcaaggagatttccaagatcgatctggcattatattcagaaaaaggaaaactggttgcggctacctttgaaccggaagtagatatggaagaggctgtaacctcatttgcagtgtctatggcggagagccagatgttatccggctgccacttttttaaagttatggtagagggcgaagtagagtacattcttttgacaagatcatccgcagaagatgcttatatggttggaagactggcagtatgtcagatccggaatcttgcggctgcgtatatggagcagtttgaccgtaataattttatgcagaacatcctgcttggcaatatgttagttgtggatatgtataacaaagcccagaagttacatattgaacaggcagagcgtgttgtatttgtgatcgagattgatggcaagaaggatgccaccgccatggaaacagtgaagaatctgtttgtgacgaagacaagggattatgtgactgaggtggacgagcagagcattgttctgatcaaagatgccagagatatgaaagaggacgaagaactgcagacgttggcaaatatgatcgttgataatatgcatacagaggctatggtgaaggttcgtgttggctatggcaaccgcgtgaataatctgcaggatattgccaaatcctatcaggaagccaagatggcattggaagttggaaggattttctatgcagagcgtgagacgatcgcatacagtctgctcggaattggacgactgatctatcagcttccgatgagtttatgcgaaatgtttattcatgaagtgttcggagacgaagtgccggatatttttaatgaggagatcaatacgacgatccagaagttttttgagaataatctgaatatctcagagacagcgagacagctatatgttcacagaaatacgctagtgtatcgtctggaacgtctggaaaaagcaatcgggctggatatccgcaagtttgatgatgcgatgacattcaagatcgcaatgatggtcattgcacatatgaaccaacagaaggtagaggaataaagaacgattccaaaccatggcagagaagatactgggtggttatgaatcaggagtgagtgaggtaagagatggcaagttatgatgagcatagcatatcggttttagaagggttagaagctgtccggaaaagaccgggaatgtatatcggaagtgtttccagaaaagggttgaaccacctgatctacgagattgtagataactcagtggatgaacatttagcgggagcatgcgatacgatccatgtgacattggaaaagaatggttcctgcacggtggaagataatggacgaggcgttccggtcggaatgcatgccaagggtgtttcggcagcacgtattgtatacacgactttacatgccggaggtaaatttgacgattcggcttataagacgagtggaggacttcacggtgtaggatcttccgtcgtaaatgcattatcaacttatatggatgtggagatcagcagagagggctatattcatcatgaccgttatgaacgaggtgttccggttgtggagttagagaacggtctgctaccgaagattggcaagacgaaaaagaccggaaccaaagtgaattttcttccagatccggaaatttttgaaaaaacacggtttaaagaggatgaaatcaagagccgtatgcacgaaacagcctatctgaatccgaaactgacgatcatctatgaagaccgccgtggtgacgaggtagaacatatcgtatatcatgaggaggacggaatccgtggctttgtaaaagacctgaataagaatacggaagtacttcatgatgttgtttattttaaaggggagtctgagggaattacagtggaggctgcattccagtacacgaatgaatttcatgagaatattcttggattctgtaacaatatttttaatgccgagggcggtacacacatcacaggatttaagacagtatttacaaccgtcattaactcatatgccagagaacttggtattttaaaagaaaaagatgtgaatttcaccggagcagatgtccgaaatggaatgacggctgtagtttctattaaacatcctgatccaagatttgaaggacagaccaagacgaagttggataatcaggatgcagcgaaggcgactgcaaaggtgacaggcgacgagatccagttattttttgataagaatttagaaaccttgaaaacagtgatctcctgtgcagaaaaagcggcgaagatccgtaagacagaggaacgtgccaagaccaatctgctcactaagcagaagttttcgtttgactccaacggaaagcttgcaaactgtgagagcagggatgcgtctatctgcgaaatttttattgtcgagggagattctgccggtggctctgcaaaaacagcgcgtgacaggaactatcaggcaatcctgccaatccgtggtaagattttgaacgtggagaaggcaagtattgataaagtgcttgcaaatgcagagattaagaccatgatcaatgcatttggctgtggtttttccgaaggatatggaaatgactttgacattacaaaacttagatatgacaagatcattattatggcagatgccgatgtggacggagcacatatctcgacgctgcttctgacactgttttaccgctttatgccggaacttatctatgagggacatgtttatgttgcaatgccgccgttgtataaggtgatcccgaataagggagaagaagaatatctgtatgatgatgcggctttggaaaaatacagaaaatcacataaaggaagcaattttacgttacagcgttacaaaggtcttggcgagatggatgctgagcagttatgggaaactacactcaatccggcaagcagaatgttgaagcggattgagattgaagacggacgaatggcttcggatatcacagaacttctcatgggaaatgatgttccaccgagaaaaacgtttatttatgagcatgcgcatgatgcagagttggatgtataacaggtaaaaatttaacatattgcaagagaatgacagaagcacaaggctgtaggataagttgtgaatcagaaacgacagacagctaagtgaacgaagcaatatggagtgtctacagaaaatatatgggagattaatagagaggatatatgatgcagcaggaagaacagattatccgtaccgagtattcggaactgatgcagaaatcttatatagattatgcgatgagtgttattatcgcaagggcgttgccggatgtccgggacggtttaaaaccggtacagagaagaaccttatatgatatgtatgaacttggaatccgatatgacaagccgtaccgtaaatgtgcgcgtattgtcggcgataccatgggtaaatatcatccacatggagacagttccatttatgatgcacttgtcgtgatggcgcaggagttcaaaaaaggtctgccgctcgtggatggtcatggtaactttggttcgatcgagggagacggcgcggctgcgatgcgttatacagaagcacgtctgcagaagattacacaggaagcgtttttgtccgacttggataaagatgtggtggattttgtgccaaactttgatgagacagagaaagagccggaagttttgccggtcaggattccaaaccttttggtaaatggctccgatggtattgcggtcggcatggtgacaagcacaccaccgcacaatctgggcgaagtgatcgatggtgtgatcgcttacattaaaaatccggatatcaacacggaacagatgatggaatacattccgggaccggatttcccgacaggagggattatcgcaaataaggatgatctgatgcagatctattccaccggtatgggtaagatcaaaatccgtggaaaagtggaggttgagcaggtcaaaggtggaaaagagcggatcgtcattacagagattccatacactatgataggtgcaaacatcggaaagtttttgaatgatgtatacagccttgttgagacaaagaagacaaatgatatcgtggatatcacaaaccagtcctcaaaagagggaatccgcattgtgctggagctgcgcaaaggagctgatacacagaatctcatcaatctgttgtataaaaagacaaagttggaggacacctttggcgtgaatatgctggcagtggcagagggacgtcctgagacgctgggacttgtgccggtcatccgccatcatgtgaagttccagtatgagctggcaactagaaagtaccagactttactgaaaaaagaattagataaaaaagaaattcaggagggattgatcaaggcctgtgatgtcattgatcttattattgagatccttcgcggaagtaagaatgtaaaagatgcaagagcatgtctgaccgatggtgtgacggacaatatcacctttaaatcggcgcagtcagaaaaaatggcatcagaactccggtttacagagcgtcagaccactgcaatcttagagatgcgtttacagaagctgatcggtcttgagatcgaggcattgatgaaagaccatgaggagacattaaagcatatcgcagagtatgaggacattttgggaaaccgtgccacaatggcgaaagttctgatcaaagagcttcagtcttataagaagcagtatgcagttccaagaaaaacagtgatcgacaacttggaagaagcggttgtggaagaaaagaagatcgaggaaatggacgttgtattcctgatggatcgctttggctatgcgaagacagtggatgtcagtgtttacgagagaaacaaagaggcggcagacgcagagaaccgttatgttttaacctgtaagaatacggataaaatctgcattttcacaaacaaagggcagatgcatctgttgaaagtgcttgatcttccatatggaaagttccgtgataaaggtattccaattgataacttgagcaactacaacagtagtgaggaaaactttgtctatattatcaatcttggcgcaatcgttcactccagattgttgtttggaacgaaaacggccatgttaaaaatggtagacggaagcgaatttgacgtggcaaagagaacaaccgctgcaacgaagttaaatgatgaagatgaacttctgatcgtgcgtgcagtcactggtgaggaaaccgttgtcatgcagtctgagaaagaaatgtttctgcgtattgaggcatctacaattccggaaaagaaaaagggagcagtcggagtgcgtggcatgaaactgaatgccggagatgcgttgagtaacatttatgtattagacggagagaatgagcagactgtcgaagtaaaaggaaaagaagtcgttttgaacaggcttcatgtcggaaaccgtgacaccaagggaacgaagcggtaaggtgagaaatcacgctgacagagaatgtatgcttcttagtgaaataggagaaagcatataagatatagaaaagcaggagttgtgacaggcatggattacgagcaggcgagagcatatgctgcaaacgtcagcaggtctggaagtatattaggacttgatagtattgaaaatttaatgcagaaacttgggaatatacaggaaaaactcaagaccatccatatcgcaggaacgaatggaaaaggttctgtcggcgcttatttagaacgcgtactgatcgaagccggataccgggtaggcagatatacttccccggcagtgttcgatcccatggaagtgtggcggatcaatctggagtctatgagccatgaggattatgcggatatcatagggcaggtgaagtgtgtctgtgaccgaatgacagaaaagggactggagcatccgaccatatttgaagtggaaacagcaatggcatttttatatttttatcagaaaaaatgcgattatgtactgctggaagtgggaatgggcggcagaacggatgccacgaatctgatccaaaagccagtctgctccgtgatcacatcagtcagcatggatcatatgcagtttctgggaagtacgctgtcggaaattgcttatgcaaaggctggaattatcaaaaaagattgtccggtcgtaacgaccatgcaaaaagaggcagcaatggaagtgataaaggcagaggcagaaaagcagcatgcaaagctttttatttcagatacttccaaagtgacaggagaaaaagattctatcagagagatccggtttgcatatccgggacttggaaccgtgacgacacatcttacaggtgcttatcaggtggaaaatgcctgtctggcaatcaaggtactaaaagaagtacttaaaatcgcggatcagaccattataagaggaatagaaaagacggtgtggcctggcagatttgaaatcgtgggagaaaagccgctttttatcattgacggtgcacataatgaggatgccgcttttaaattaaggcaaactgtggaaaattattttacaaacattccgataacttatataataggggtacttgcagataaagagcatggaaaagtgctgaaaacgatgctgccttacgccggagcagtttttacagtcacaccggacaatccgagggcaatgaaagcggaagaattggcgtctgaggcagaaaaaatcgtcgacagtatgtggatacagaacgcagaaatgccaaaacaggtgcaaaagccagaagtgaaagcgtgcagttccattgtcgaggcagtgaaatgtgcaatggcatgtacgccggagaatggcgtgatactcgcgtttggttcattgtcgtatctgaaggatataaagccatgcattttcagtatagataaagaaggataaaaagatggataaagagaaaatacaagagggagtcagattaatattggaaggaatcggggaagaaccggacagagaagggcttgtcgatacccctgaccgcattgccaggatgtatgaggagatttttggcggactgacacagacagcggaggaaccgttatccaaaacctttcacgtaaaagacaatgcaatggttttagaaaaagatattacgttttactctacctgtgaacatcattttatgcctttttatgggaaagcacatatcgcatatattccggacggaaaagttgtaggcctgagtaagcttgcgagaacagtggaagtgtatgcaaagcgtcctcagattcaggagcagctcacagcgcagattgcagatgcgttaatggaatatttaaagccacagggcgcaatggtcatgttagaagcagagcatatgtgtatgactatgcgtggtgtgaaaaagccaggaagcaagaccgtaacctttgtaacacgcggtgctttcgcagaggatgaaaagctacagagacagttttttgaattagtgaaagcttgaacatgaggaaatgtatagattatggcataaaaacagcggttagaaaatgccagatgacaagtcgggaaaggttagaattatgagaataggcagcagggattttgcaacaagtggacatacttatgtaatgggaatcttaaatgtgacaccggattccttctcagatggtggaaagttcaatcagatggatgcagcattaaagcatgctgaggagatgatagtagatggtgcggcaatccttgacatcggcggcgaatccacaagaccgggatatacaaagatttcggatgaggaagagatcagccgcgttgttccggtgatcgaagcagtgaaaaaagagtttgatataccgatttctgtggatacttacaaaagcggcgtagcaaaggcggcagcagaggcgggagcagatatgatcaatgatatctggggattaaaatatgacgatcatatggcagatgtcattgcaaaatccggactggcatgctgcctcatgcataatcgtgacaatgcagaatatcagaatttcatggaagatatgaaacaggatctgcgtgagactattgcactcgcgaaggcggcaggaattgaagacgataaaattattttagatccgggggttggattcgcgaaaagttatgagaataatctggaggctattcgcagattggaagaactgaaagagttaaactatccggttttacttggaacttccagaaagtctgtgatcggattgacactggatcttccggcagcagagcgtgtggagggaacacttgtcacaacggttatggcagtggaagcagactgcatgtttgtgcgcgtgcatgatgtaaaagaaaattatcgtgcggttcagatgacagaggcgattttgtacgggaaaagatgatttgaaaggtatctgagatgacaggagattttattaaaataacaaacttaaaggtgtttgcacatcatggagttttcccagaggaaacgagggatggacaggatttttatgtaaatgcaaagctttttttagactgcagaaaagcaggaaagacggatgaactttccgattctttgaattatggggaagccagtcattttatcacggattttttacagaatcatacatacaaattgatcgagagcgtcgctgagcagctggcacaggcgatgcttctttctatgccgattttaaaaggtgtggaaattgaattatgtaaaccacatgcgccaatcggacttccttttgaaaatgtttcggtgacgatcgaaagacagtggcatcaggcgtatctggcggttggttcgaatctgggggataaaaatgcctacattcagaatggaatcgaagaactgcgccagatcagagaaatcaaagacattattgtttcagaacttctggtgacaaagccttacggtggtgtggagcaggacgattttgtcaatggagcgattgcgttaaagacgctttttacaccgcaggagttactggaaaaactgcatgagatcgagcagcacgcaaaccgggaacggaaaatccattggggacctagaactttggatctggacattattttttatgataagcttgtctatgaagatgagaacctgatcattccacacattgatatgcaaaacagggattttgtgttaaaaccgttatcggaactttgcccgaattaccgtcatccggttcttggaaaaacggtagtgcagttgcttggtgaactgaaggaacgctagataaattagtttaggacagttggtgcaatttttatagaaataaaggaaacagttgatttatgataaaagcaattttatttgacttagatggaaccattatcaattccgaagaaggaatcacgaagtgtgtgcagtatgcattgaaaagcttcggagtagacgaaccagatctgaaaaagctgttgtgttttatcggaccgccactcgaacctgtttttcgggaaaaatatggatttgacaaggaaaaggcatggcaggcagttttaaaatatcgcgagcgatttgataagacgggtatttttgagtgtgaattgtacgacggtgtggcagaggcaatcagagaactgaaagaagaagggtatgtgatcgcactggcttcctcgaaaccggagactgcgtgcagacgcattctggatcatttttccctgacatcctattttgatgagattgtgggatctactctggatggaagtatcagcaccaagcaacaggtgttagaagaacttggcagaagaatggaacacatgaacatcacgaaggatgaaatgtgcctgatcggggataccgagtatgatgcgatcggagccagccagtttggaatccgctgtatcggtgtttcctacggatttgggaaaaaagagcagttagagcaagcaggtgcatactgtgtctgcgacagcgtgacagaggttgtggaggtattacatcatatgtaatctgttatatctaagagcagaagataatagcaagagaaatcgagaggaatagcagcatgaaaacaaaaacaggttttaaactgtggcagattatctatccaattggtatttattatgtggtatcgagcctgatgtactttgtgttaggactttttatgggtgatgaacagcagacttatatgctgcggcagttgatctgctcggcagcaacaattcctgtcactatgagcttttataagcaggataagatcgctgaggacattgtatatggaaacggaacggaaaaatggaatcggaaaagaacatgggaagtccttcttacagttcttggagcagtgacgcttggaatcgccgtcaataacgtgatcgcaatgacaccgttggttcagatgtcggaaggatttcaggaggcaaaccagtccttttttgcgggaactgtgatattcgaattgttaggttcctgttttgtgataccaattgcagaggaattactgttccggggtgttgtatacaagcgtttaaagctatatcttggtgttactccggcgttatttggctctgcgattatttttggtgtgatgcatgtgaatttggtgcagtttttgtatgcatccgtcatcggtttgtttcttgcatttgtgctggaaaaaacaggaaagtttatcatgccggttctgggacatattgcagccaatctcattgcagttatgcggacagagactggctggctggattttagcttttatccgaccgtgtccggaattttatttacagtggtattgctggtgatcggagtaacggttgtctggtggttttataagcgggactgctgttaaagacataactgatacactacaattcccacacaattcaagaaaaaccgcccgtatcaatacctcaccacataaaatctcaaaaaaaattatcccataatacaacaagaattgtttttatgagaccaatatcgtgaaaatattaactaaaaagtatatacaattagatgtataaattaagaatattcaaattatcagacaatagctcaaaaaaatagatagacaaagaaataaaaaagttgtatattacaaagtaacaaaaacaaaataattcatgaagcaaaggcgcttagatacccaatcgatcattgggttatttgagcgctctttttatttccaagggaagtttacttccacggaaggcagcaatttctatttgaattaagaaaggaagtctaagatgaaagagcagcagaaggaacagaaaaacacatctgcaaaaatggtcactctgaacaaatttgcaccaaaagattttcaaacgaaaacagacggaatgtacgacccggcatttgaacatgacaactgcggtatcggttccgttgtaaatattaagggtataaagacacatgagacggtcgagaatgctttgaaaattgttgagaacttaaagcacagagcgggaaaggacgcagaaggaaagaccggagacggtgttggaattcttttacagatttcccataaattctttacgaaagctgtaaaaccgcttggtatcgaacttggaggagagagagattatggtatcggtatgtttttcttcccacaggatgagttaaaacgcaaccaggcaaagaaaatgtttgaagtcattgtacagaaagagggcatggagtttttaggttggagagaagtaccgatcgatccgaccaagcttggacagaaagcaatcgactgtatgccatacatcatgcagggctttgtgaaacgtccgaagaatgtggaaaaaggacttccttttgaccggaaactgtatgtggcaagacgtgtctttgaacagtccaatgatgatacatatgtcgtttccttatccagcagaacaattgtatacaagggaatgtttttggtagagcagcttcgtttgttctttgcggatcttcaggacaaagattacgaatctgcaattgcaacggttcattcacgtttctctaccaatacaaatccaagctgggagagagcgcatccaaaccgtttcatcgtgcataatggtgaaatcaataccatcaaaggcaatgcagataagatgcttgcccgcgaggaaactatggagtctgaatttttaaaaggagaattacagaaggttcttccggttgtcaatacggaaggttccgattcagcaatgctcgataatacattggaattccttgtgatgagtggtatggatctgccacttgcagtgatgatcttaattccggaaccatgggcaaataataacctcatgtcccagaagaaaaaagatttttaccagtattacgcaacgatgatggaaccttgggacggaccggcttccattcttttctccgatggtgatattatgggagcagtgcttgaccgtaacggacttcgtccttcccgttattacattacggatgacgattatctgatcctttcttccgaggttggtgtgttagacattgatccaacgaaaattgtagtaaaagagagactccgtccgggaaaaatgctcctcgtagataccgtgaagggcagagtaatcgatgatgatgagttaaaagagacctatgcaggcaaacagccttacggtgagtggattgaccgcaatctgttaaacttaaaggatctgaaaattccgaatcagcgtgtgccggaatacaccaaagaagaacgccagagaatgcagaaggcatttggctatacttatgaatcattgcgggatgcgattttaccaatggcaaaaaatggtggcgagggaacatctgcaatgggtatcgatacaccgctggcagcgttggcaaccgatcatcagccattgtttaactacttcaagcagttgtttgcacaggttacaaacccgccaatcgactcgatccgtgaaaaagtggtaacatccacaactgtttacatcggagaagacggtaaccttctggaagaaaaagcgattaactgtcaggtgttaaaggtcaacaatccaatcctgaccaacacagacctgatgaaaattaaaaatatgaaagtagatggttttaaggtagaagtcattccgacgacctattacaagagcacaagtctggaaaaagcgattgagcgtctgtttgtggaagccgaccgtgcatacagagacggtgctaacattttgatcctgtctgaccgtggtgtcgacgaataccatgtgccgatcccttcactgcttgccgtatctgctttgcagcagcatctggtaaagacgaaaaagagaactgccgttgccatgatcttagagtccggtgaaccgcgagaggtacatcattttgcaacactgttaggctatggtgcctgtgcaatcaacccgtatctggcgcaggataccgtaaaacagctggtagacgagcacatgctcgataaagattactacgcagcagtggacgattacaatgcagcgattttaaacggcattgtaaaaatcgcttccaaaatgggtatttccacaatccagtcttacgagggttcgaaaatcttcgaggcgatcggtattgattcggatgtgattgacaagtatttcacaaatacggtcagccgtatcggtggaatcactttaaaagatattgaaaatgatgtgaacgaattacattccgcagcatacgatccgcttggtttggaaacagatcttactttagacagcagaggacgccataagatgagaagtggtgcagaccagcatctttataatccggcaaccattcatttattacaggaatccacaaaacgtggagactacaatctgttcaaacagtacacagatcttgtaaacagtgaggaaaaggacggctgcatccgcggactgatggatttcaactatccgaagaaaggcgttccgatcgaggaagtggagagtgtcgattccattgtgacaagatttaagacaggtgcgatgtcctacggttccatttcacaggaagcacatgagacacttgccattgcgatgaacagacttcacggaaaatccaataccggtgaaggtggtgaagattatgaacgaatcgcaagcaagaacacagccgtagacagatgctccaagatcaaacaggttgcatccggtcgatttggtgtcacaagccagtacttagtcagtgcggaagaaatccagatcaagatggcgcagggagcaaaaccgggcgaaggtggacatcttccgggcaaaaaggtttatccgtggattgcaaagacaagactttccacaccgggagtatcattaatttcgccaccaccacatcacgatatttattcgatcgaggatttggagcagttgatcttcgatttgaagaactccaaccgtgatgcaagaatctctgtaaaacttgtttcggaggccggtgtcggaaccgttgcagcaggtgttgcaaaagcaggtgcacaggttgtcttgatctccggttacgacggaggtacaggtgctgctccggcaagttccattcacaacgcaggacttccgtgggagctcggacttgcagagacacatcagactttaattatgaacggacttcgtaataaggtaaggattgagacagatggtaaactcatgagtggccgtgatgttgcaatcgccgctttgcttggcgccgaggaatatggttttgcaacggctccgcttgtaacaatgggctgtgtcatgatgcgtgtctgtaacttggatacctgtccggcaggtattgcaacccagaatccggagcttcggaaacgttttgcaggaaaaccggaatatgtggaaaactttatgaagtttatcgcagaggaacttcgtgaatacatggcaaaacttggctgcagaaccgtggatgagatggttggacgaagtgatctcttaaaagtccgggaagatctgaccggacgcgagaaagagatcgatctttctaagattttgaacaacccatttgcaggaccgaaggagaaagtgacctttgatccaaaacatgtatatgattttgaactggaaaaatcaaaagacgagacggtacttttaaaacagcttggctctgcacttgcaaataaacagcgcagaagcattgatgtggaagtgacgaacacagaccgttccttcggtacgatttttggttctgagataacaaaaaaatatggaaccggcttagaggaagacacatttgtagtaaaatgtaccggtgcaggaggacagagtttcggagcatttatcccgaaaggactgacgcttgaactggtcggcgattccaatgattatttcggaaaaggactttccggtggaaaattagtcgtctatgccccggctggcgtgaaatacaaaaaagatgagaatatcatcatcggtaacgtagccctttatggcgcaacgagcggaaaagcatttatcagcggtgtggctggcgaacgtttctgtgtgcgtaactcaggagcctcagccgttgtagaaggtgtcggtgaccatggctgtgagtacatgacaggcggacgtgtcgttgttttaggtaaaaccggcaaaaactttgcggctggtatgagcggcggtatcgcatatgtgttagatgaggataacgacctttacacccgcatgaacaaagagatggtattttctgaggaagtatccaataaatacgatgttatggaattaaaagacatgatcaaagagcatgtggcatttaccaattccgaaaaaggcaaagaaatcttagacaacttcagtgagtatctgccgaaatttaagaaagtaatcccgtatgattacaaccgtatgctgatggctattgttcagatggaagaaaaaggtttgtcgtccgaacaggcacagatcgaagcattctatgcaaacacgagaggataagaaaaagaatctgagaatctgaacaaaatcagagaaaaacagcaaagacggaaaatggaggaaatatcatgggaaaaccaaccggatttatggattataaaagagagacatcgataagtgaagcaccattggagcgtatcaaaaactttaacgaattccatacaccactttcaaaggaagaacagcagatacagggcgcacgctgcatgaactgtggcgttccgttctgtcaggcaggaatgaatatctgtggcatgacaagcggctgtccgctgcacaatctcgttccggagtggaacgatcttgtatacacaggcaattgggagcaggcatacaaccgtctgaaaaagacgaacaactttcctgagtttacatcgagggtatgtcctgctctgtgtgaggcagcgtgcacctgcggacactggggcgatgctgtcacctgcaaggaaaatgagcatggcatcattgaaaatgcgtatgaagaaggttatgcaaaagcaatgccaccgagagtgcgtaccggaaaaaaagttgctgtcatcggttccggtcctgccggactggcagtggctgaccagttaaataaaagaggacatcttgtgactgtttacgagcgggacgacagagtgggcggacttttaatgtacggaataccgaatatgaaactggaaaaatgggtaatcgaccgcaaaatcaacattatgaaagaagaaggcattacatttgtcacaaatacgaatgtcggcaaagatgtcaaagctgcaaaactgttaaaagaatatgacagagttgttttggcatgtggagccaaaaatccaagagatatcaaggcaccgggcagagatgcgaaaggtatttattttgctgtggatttcttgaaagctaccacaaaaagccttttggattctgaattgaaagacaatcagtacatttctgcaaaaggaaaaaaagtcgtcatcatcggtggtggtgacaccggaaatgactgtgtgggaacttctatccgacatggtgcagcaagcgtgacacagcttgagatgatgccgaaggcaccggacacaagagcggaaaataacccgtggccggaatggccgaaagtctgcaagacagattatggtcaggaggaggcaatcgcagtgtttggtcacgatccacgtatctatcagacaacggtaaaagaatttttgaaagataaaaacggaaatctctgcggtcttgtaaccgtaaagttagagagtaaaaaggacgagaaaacaggccgtatgatgatggcagaagtaccgggttccgaacagaaaatggatgcagacctagtgctgatcgcagccggattcttaggaacagaaaactatatcgccaacgcattcggtgtggatttaaatgccagaacaaacgttgcaaccgctgaaggagcttatgcaaccaatgtgaaaaacgttttcaccgcaggggatatgcacagaggacagtcacttgtcgtatgggcaatccgcgaaggacgtgaagcggcaagggaagtggatgagagcctgatgggatattcgtatttgtcggtgcagtaaagactgaattatcatttgtatgtaattgtctcaattttttttagattatataaattgcatgtgatgacaatttcaaaaaataggaaagaactgtttgttttcagaattggattttttataattctgaaaatagagcagttctttttttgttctgttttctgctgttaagggaagttgcattggaaaaatacttatgttagaataaatctagtgaaaagaaaatattaagatagtatttgaatgatttcggaaagtgggggatttagaaatggttaaatacttagaagcagcagaatgtatttgtctggcaatatctgtttgcaatcttattgcagtaggttttgcaatgaaaaaacagaaatctattaataaaataatgtattttgttaataatcttggtattgttgtgttatcaaatcttattgtttggacggaaggctgttatgtggatgaaaataatttaagtggcagtgcaattacgtttattttgaacatttgcaatatcgtattttttattgtgagtagtataatgggatttaaatgcgagaaggcagaataaagaattgataatatatgttttgatttgataaacgtttatgcaggagtggtaaatataggtatgcttcaattgggcaggagataatttatgaagaataaattatgtatattatttgcaattgttttattgatcgttggtggatgcaatgaaaagtcacaaaattattttacagggactattttggaaataacagataattattttattgtaagtccggatgattcggaaacaattagggagaccagtgataatatattagttccaaaagaggtggtatcagcgaatggagtcccagagctggcagttggtgagcatattcaggtggtttataatgaaatggagcaaacggatgaaggggtgatcatagacattgtttatgcaatatacaaagaaaatgatttagaagctactcaggaaaaatgaaattgtaaagaataaatgaagaaaacgatcttagagaaaaagccaaagtctaacgacttcgctttttctctttttttacactgtatccaaaagtgccaagttttttcccaagaagaaaatattctccgtgggaataagtgacaagaccactctggtttaattcgaatttacctttttcatcgagcagggtgtcatcaatggtaacgcccacaacatcagcaaggatcatggaatggcttccgagtggcttaatctcgcggaccttacattcgatatttaccgggctttcagcaatgccgggtgcgtggacatgctgggacggaagtggagttaagtgcatttctttgaatttgtcaacgtcacggccggagcggacaccgcagtaatcggttgctttcaccagcttttcggttgttaaattaatcacaaattcaccggattcctcaatcagatgataggagtagcgttccgggcggacggagatcgaaaccattggcggattcgtgcagacggttccagcccatgccacggtgataatattcggttttccttctaactctggtctggtgcacaatgcatctttttcggcggaactctgacagctcaccatgaccgctgggagcggatagagcatatttcccggtttccagttttgttttgccatgattgtaaacctcttttataaaaataaatcgttgtaatatcccaaaataatctgtgatataaaatcatgtttcatccgtggatattacttcagaagaatatccattaaataagcatagacatcttcatttaaattcttccagttgttgcagattgcctctgcctgcgctctgtttttgacactcaaagtcaggtcaatcaggtttgtgttgtgttcgcggtactgacagcgcacagcgtaatcctgatttggagtcttgtaataatctgccagaatggaattgtcgttccttagctgcagctgattcttttcgagaaatgccattgtgtcgtgttcaatcgcatcggaaattttgtctttgaaaaattccagtgtttcttttccggcagcagtgatcgtgtactgggtgttgctgtgtgtggattctgcatgaatcaagtttgcgtcatcaagatcacttatgacctgctgtacacggaaataatcggtataatcctgctccaagaaaaagttcgaaatctgtgtattggtcaatggaaaatcgactttatccaacatgtttaaaattgtcaacttatatattgtaaaaggttcagccatgtagtatacacctctttctttcatgtgggtattagacgttattgatatagctttccctgccacgtatcacgctcctggaagcgtttgtgtatcgtatttaaaacgcgttttttatcggtgctccacagtggcgcaatcaaaagggagcgcggaccgtctcccgtgatgcggtgcacgaccatttccggtgggagatgttcgatacaggtcacgacaaaatcacagtattcttccagtgaaaataccggaaaaggattggtttcgtaaagaagtgccagatcggtatgcttcaacacatggagaagctgtaatttcacaccgtcaaccggaagatgtgcaacagcgtctaccgatgcaagcatcatttcttccgtctcaccgggcagaccgagaatcagatgtgtgatcacagtaagattgcgttctttaagcgcgtctacagcagataaatactgttcataagtaaaaccgcttcgaatctgctgcaaagtagtgtcgtgaatggactgcaatccaagttcaacccagacgggcttaagcttattgaattcggtcaacagatccagaacatcctccggcagacagtcacagcgcgttccaatggagagcgcgacaatgtccggatgacagatcgcctctgaaaaaagttctctcaaataggaaacgggagcatacgtgttcgtatacgcctgaaagtatgcaatgaattttttgcagttactttttccacggatacgttcctttgcctgtgtaatctgttcggtaacagacaaagcaggggcagtggcaaaatcgccactgcctccggcactgcaaaaaatacagccacgtgaatctaacgttccgtcgcggttcggacaggtcatgccgccatttaaggacaggcggtagattttttcaccaaacgtctgctttaaataatagtccagggaataatagggtttatcaccccagcggtttaaaagttccattttattttacgatatgggactttacagcctgacttacgacttcggcaacacgagggtcaaaagcttccggcataataaattcatcgtttaattcttcatcggaaacaagatgagccagagcttcggcggctgcaagtttcatttcctctgtgatctgtgtggcacgtccctccagggcacctttgaagattccagggaatgcgatcacattgttgacctggttcgggaagtcgcttcgtccggttccgaccactcttgcaccggcagcttttgcgacatccggcataatttcaggtaccggatttgccattgcaaaaagaatggaatcatgattcatggaagcaaccatttcaggtgttacgatattaggagcggaaacaccgacaaaaatatcagcgccctttaatgcatcggcgagtgttccggtagcattttccaaattcgttacctcggtcatttttttctgcatccagtttaagtttggataatcttttccgatgataccctcgcggtcgcacatggtcacatgtttaaatccgtaagttaaaagtaattttgtaatggcaacaccggcagaaccggcaccgtttacaacgactttgcagtcctcttttttcttgcctgtgacacgcagaccattgatgatacctgctaaaactacaattgcagttccatgctggtcgtcatggaataccgggatatcaagcatttcttttaaacgttcctcgatttcaaaacagcgcggagcggagatatcttctaagttgattccgccgaaagcaggtgcaaggtttttgatcgttgtgatgatctcctctgtgtcctgtgtgtctaagcagagcggaacagcgttcacatttccgaattctttgaaaagaacgcattttccttccataaccggcatggcagcgtatggtccgatattgccaagacctaaaacggcgcttccgtctgaaatgacagcgacggtatttgccttcattgtataagtgtaggcagcttctttatcctctgcgatgactttacaaggctcggcaactcccggcgtatatgcgagcgcaagatcctctctggaattgacctttgactttgcgatagtttccaatttaccattccactctttatgcatggctaatgctttttcttttaaatccatgatatgaaccgtctcctttatgtgaatattcatttaaactctgaaagtaatgataacatttccttttttattaatcaagaaaattaggacttcctattttggaaaaagtgttgtataataaaataagttacagattcatttagtcgattcagacgttgttcccaaatgatacaattatgattaaggagtcattgaatgagagaaaaatatgaaagtttatcagcaacggttttgcgtgatttagcaaaatcaagaggaatcaaaaacacttccacaatgaaaaaagcggatctcgtagaggcaatgcttgcggaggacgcaaaaaaggaaaaagaaaaagcagaaaaagaaccggagaaaaaacaggaacagacgaatagcacagtgaaaccggagcgaagaaaagcagactcatccgaaccagcgaaagagggaacaaaagagggagagcgtgaggatgccagccaggatgacacgatgaaaaatcttgacagtggaatcacagtgaacggaattcttgaggttatgcaggatggattcggatttatccgttccgacaattatctgccgggcgagaatgatgtttatgtgtcaccttcccagatccgtagattcaaccttaaaacaggagatatcatctgcggtaacacaagaatcaaaacacagcaggagaagttctctgcattattatatatcacaacgatcaacggttatcagccgggcgtgatccagcagagaaagaattttgaagatctcacaccgattttccctaatgagagaatccgtttagagagaccgggcagcagtgttgcaatgcgaatcgtggatctgatctcgccgatcggtaagggacagcgtggtatgatcgtttcccagccaaaagcaggtaagacaaccctgttaaaagaagttgcaaaatctgttactgcatccaacccggacatgcacctgatcattttactgatcgatgagcgaccggaagaagttacggatatcagggaagcaattgagggagaaaacgtagaggttatctattctacatttgacgaattgccagaacatcataagagagtatctgaaatggttatcgagcgtgcaaagcgtttagtagagcatcacaaagatgttatgatcttacttgacagtatcacacgtcttgcgagggcatacaacctcactgttccaccaagtggacgtactttatccggtggtcttgatccggcagcactccatatgccaaagagatttttcggtgcagccagaaaaatgagagagggcggcagtcttaccattcttgcaacagcacttgtggataccggaagtaaaatggacgatgttgtatatgaggagttcaagggaaccggtaacatggaacttgtacttgaccgcaagctttccgaaaaacgtgtattcccggcgattgatattgtaaaatccggaaccagaagagaggacctgctgcttgatccggacgagttagaagcagtggagatcatgcgcaaggcatataacggtatgcgtgcagacgaagcggtagagaatatcttaaatatgtttgcccgcaccaagaataataaagaatacatcagcatggtaaagaaaaatagaattatttaaaaaatatcttgatttaccatgattcgtatgctatactataaaagctgtttatcgggataaagaatcttttacaggttctggacagttttttatatcgtgtatattcttgcagtaagtgccatatgcgaatcgggtatacgggcataaagagtatagaacaagcataacaaatcaacgataagaatagaagaggtgaaaatcatgagagaaggaatccatccagattattatcaggcaactgttacatgtaactgtggaaatacatttgttacaggatcaacaaaagaagatatccacgttgagatctgttctaaatgccatccattctacacaggtcagcagaaagctaacagagctgatggtcgtattgataagttcaacaagaaatacggtatcaacaaatagaaaaaagtggttacagataaggttgaggttattaaatctcaaccttttttagaacatggaaactctatgagaaagacatggtttttaaaatgaaatattcaggaattggcggacaggctgtcatggaaggcgtcatgatgaagaatcaggaaaagtacgccgttgcagtaagaaagcctgaccatgagattgaggtaaaggtttcagaatatactgggatcatccaaaataagaaaataagaaatatgccgattttaagaggcgtattcagttttatagaatcgcttgtacttggaatgcagacgttgacgtattccgcttctttttttgaggatgaagaagccgacaagaaaaaagagacaatgtctgagcaggagcgtaagaaacaggagcagaaagagaaaaagcaggaaagtgccatgctgggcggaaccgttgtgttatccattgttcttgccgtagcagtatttatgatgcttccatattatatatccacgctgtttcagaaagtaatcacatcccagtgggtgatcgcgctgttagaaggcgtgatccgtctggtgattttcatcggatatgtggcgctgatctctttgatgaaagatatccggcgtgtttatatgtatcatggtgcggagcataaatgcatcaactgcatcgaacaaggtctggatctgaacgtggaaaatgtgagaaaaagttccagattccacaagcgttgtggaacaagttttcttctgatcgtaatgttagtcagcattttgttttttatgtttatccgcgtggattctccaattttaagggttgtactgcgtctgctgctgatcccggtgatcgccggtgtatcgtatgaatttatccggctggcaggaagaagtgacaatgcagttgtgaatcttttgagcaaaccgggattatggctgcagggactgacgacaaaagaaccggatgatgagatgatcgaggtcggaattgcttcggtggaagctgtttttgactggaaaccttatgtggaagaaattcgccgggaaatgaagtagaagggcgtgagatagaaatgacatatcgggaagctgttgcccatggagagaaagtgttagagctttccaatattgcagatgcgaagacggatgcatggctgctgctggaaatgggttgtaagatagatcgtaaattttattatatgcatatggaagacgatcttcctgatgatctgctgagggaatatgaacttgccgtcaaaaagcgtgcagagcatatcccgttgcagtatattgtgggcgagacggaatttatgggactgaagttcaaggtaaattccaatgttctgattccgagacaggacacagagacacttgtggaggaagcattaaaaacagtaagaccgggaatgaaagtgctggatatgtgcacaggttccggctgtattattatcagtattttacataacgttgagggcgtgaaagggtatgcagtcgatatctccaaacaggcgatcaacgttgccaaagaaaatgcgaaattaaatgagattccggttctttttgaacggagcgatctttttgaaatggtcacgggaaagtttgatgtgatcgtatcaaatccgccttatatagcaacagatgtgattccacagctgatgccggaagtgcgggtatttgagccaatcgaggcgcttgacggaaaagaggacggactctatttttaccgtaagatcgtagaacagagcaaggattatctgaatccgggtggctctctgatgtttgagatcggttatgatcagggaaaagatgtttcagagatgatggaagaggctggatttttagatgtctgcgtgaaaaaagatcttgcagggcatgacagggtcgtgacaggaatgttgtagcggcgtcaggaagcaatcagtaaaagctataaaatgacaagcgtagttatgtaaaaaatgacatatgtagtcatgcacactgcatgagacgatgatacaattttttggaaaagaaatgagggagaaatatgtttgataaattagaagacttactcatccgttatgaggaattaatgagtgaattaagtgagccggatgtagcgaacaatccggaacgttttcgtaagctgatgaaagagcagagcgacattctgccaattgtagaggcttacaaagagtacaagcagtgcaaacagaatattgaggattcccttgcaatgctagaggaagaatccgacgaagaaatgcgcgaacttgcaaaagaggagttaaacgaggcaaagagccgtgttgctgaattagagaatgaattaaaaatccttcttttaccaaaagatccgaacgatgacaaaaacgttatcgtggagattcgtgcaggtgcaggtggagatgaggcagctttatttgcagcagaaatctatcgtatgtaccagcattacgcagagacaaagaactggaaaacagagatcatggaatgtgatgataccggaatcggtggtatgaagagtgtaacctttatgatcacaggagcaggtgcttactctgtgatgaaatacgaatctggtgtacaccgtgtacagcgtgtacctgagacagagtccggcggacgtatccacacttctacaattaccgtagctgtgatgccggaagcggaagatgttgacgtacagattgatgagaaagatatccgtattgatgtatgtcgtgcatccggagcaggtggtcagtgtgtcaacacgactgactctgcggttcgtttgacacatattccaaccggaatcgtgatctacagccagacagaaaaatcacagatccagaataaagcaaaggcatttgcactgctccgtacaaagttatttgacttagagcagcagaaggcacatgacgcagaagcagaacttcgtaagagccagatcggtaccggtgaccgttccgagaagatcagaacttacaacttcccacagggacgtgtgacagaccaccgtatcaacctgacactttacaaattagataaaatcatgaacggtgatattcaggagatcattgatgcgtgcatcgcagccgaccaggcagcaaaactggcgaatatgaatcaggaagcgtaaaatccagttcatgaagaatatcctataattttgaggaaccagagaaaatctctggttccttttttaacgctttcgggttttattctgagatcagccagtcgaggaggttgatagattttatgccctcatacgaagagtccattcctgtatttagggaaagaacgattttctcatagttatcgttgattttttggagtggtgctaattctcttttgcgaacatcttcacttgtcattgattccgtgacctggacataaagtttatcatctgcttttgttgcaataaaatccacttcaagattatcaattttaccaatagagacatcatagccgcgacgaagcagttcaaagtaaacaacattctctattgcatgaccgctgtcacggtctctgaacccaagcagatagtttctgagtccgatatcgacaatgtaatatttgccaagagtgcgtaagaattcttttcctttaatatcgaatcttttgatgtcgtagaagaaatatgattccagcagtgcatttatatatgtctgaactgtgtgagcacttggggttccttttcgattcttgttttccagaagtccttcatttactaaggtgttgccgatagaagaaatagagatattgtttccaatgttatcagcaaggaacatagtgatcttttttaagaggatggggtcggtgacccgcttttgacctctgcgattttctcgttcgagaatgtctcgcatgataacggtggagtatataccatcgagcagcacaagtgctttttcctgatctaaacctatgtcagcgatacccggcattccgccaaatcgcatatatgcatcgaaaatctcacggagttcataatgttcgcccattttatcaaaaacctgtttgcgtgtaccgcctaaagcactctttgtttctcttatttcaaagtcgtggaatgttataaattcagagaaagacaaaggcagcatttttatttctatgcatcttccggataaataagtggcatattcagaggagagcatataggcatttgaacctgtgacataaatatcacagttgaaatcaacacggaaagagttgacagcatcctcccagtcaggcacacgctgaacttcatcaaaaaagaggtacattcttttatttggtacgatatgctgtttgacatattcatagaaagaatcgctggtcatatttttataagcgtaggattcaaaattcatttccagaatctgatcgccagtaataccagtttctttcagatgaagggtcattaacttcaacagactggatttgccgcatctacggattccggtaacaaccttcactggctcggtgtcttgaaatgctatgatcttattcaggtataaatctctttttttgagttcgtgagtatcaatcatttgatatacctccttatgacatgagtatagcataaattcttgaaaaaataaagtttatgcaccgaaatgcaaaaactttgaaaaatcgacaatttttgcaatggcgcattacatagaaaatatttcaatatactgatataaatgttagtgaaatttaaaaattgttgtgataaaataagttgttggtatttacagtgatggtgagtaagaatggcgataacaataaacatcacatgctttaaataaaaaattagaatacaggagacaaaaaatgcaggacgatttaagagcagaactgatcaaacaattcccatccgaagtggtggagacaaaggatatgacagggaacgagtactatgcctgtccgacttgtaagcgtgcagttgcaaccggcactgaaaaatgtcagggatgcggacagaaattaagctgggacaacatcaggcatgagaatgagacaaaaggaagtaaaaaagcgaaaatcgagttcgatgttccggcagattttacattggaggactgcagaaaatgcccattgtcctatatcggaagaaacggggatgaaaatgtttacgaatgtccgttgcagatgcgtggaagctgcaagctggaattatcataatgaaatatcagtcggaaaggaagcatacatggcatcaaaattctacgcagtaaaaaaaggtaaaattccgggaatctacaacagctgggatgattgcaaaaaaatggtggatggttttccgggcgctatatataaaagcttcaagacactggaagaggcaaaagcttttgtgggaacagcaggtacatccaaaaagcaaagtgcaaagacagaaaaatcggatacaattcaattagaagatacgccttcaatctacgctttcgtcgacggctcctataacattgccaccaaagtctacggctacggcggatttctcattcataatggagagaaagaagtgctgcagggaagcggaaatgatgcggagatggcatctatgcggaatgtttccggcgagatattaggtgccatggcagccgtaaggcgtgcgattgatttgaaacttccagaggtaacaatctattacgattacatgggaatcgagatgtgggcgaccggtacatggaagcggaacaagcagggcacaatcgcctactatgattatatgcagtcggtgaaaaataaaatcaggattaaatttgtgaaagttaaaggtcattccggtgtggatggcaatgaggaagcagaccggctcgcaaaggaagcggtcggaaacacaatttaagagacaatatctggcacagggcaaagggattccacgacataagggaatcctttttttagttctaaatggctgatacaaagggctcgaattccactacagaaagacagatgtacgcactgcaaaaaaagaaacgttttcaaataaataattgataaaaaagccttttaaggtttgacagacgcaaaatatgtggctataatgtgagaatcaaaaaagataattgtcagattttttaggggggggg

SEQ ID NO: 14399 - DNA, 66488 bp, Unknown
  gut microbiota DNA sequence
aaaaagtatattaggatggaaaggaaaaaacagtttatgttgtcacaaaagagtacaatgaaaacaaaacttgaaaaaatgtatctgcaggaaagaatcagttacggttataaaaaagtcattaccatgatgctggtgtcagggctgatttctattattgcaataggcattctgtttgccaatatgatgaattatgtcaataatgtcaacgcagcagatcaggcagtcaaaacatgcaggatttatattaatatagcagcaagaaatatccgtgagatggcgctgaatgatgacgaatccacttacgacagctacgaggagaaggtggaggaggttcttgggactgtagatacacagatgaatgttttacacggcacaggtgttattacagaggacctctatacagaatataaagatgcatttacggactggggaacaatcggatatgagattatggaagagatcaaagccggccaggaagatcaggctgtcgatggtatcttcaatgagtgtacccctgcattaaacagattagtagaaatttcaaagaaattagatgcattgaccagtgaacagagagataaggctgtccagagcacgatcttctgtgcagctgccggtattgcagtgatcattttcttcctgctccttgcatgggcacaggcaaagagagtgagcaaagcagtgctggaaaccattctggaaccattacatgcgatcgaggatgtggcgaaggaactcacggaaggaaatctgcacagccagctggaataccactccgaggacgagatcggaagacttgcacacagcatgcgcaaatccatccgtattcttggaacgtatgtcgatgatattgaccgctccatgaaacagttctcagagggcaattttgatgtacagccagaggtagagtggagaggagactttgttggtattttacattcctttatggagttccagaacagcatgtctgatacggtaagaggaatccagagggtttccgatgaggtgtccaacggagcagaacaggtggcatccagctcaaacgagcttgcagacggcgcaacgaatcaggcagcagttgtcgaggaactgaccgctacggttaccggtgtttccgaacaggtggcaaacaattcacaggcagcaaaagagatcagtggaaaagtggaacagcttggacaggcgctgatcgagagcaacggaaagatgcacgagatggtcggctctatgaatgagatcaatgatgcatcacaggagattgacaagatcattgcgacgatcaatgagatcgcatcccagaccaatctgcttgcattaaacgcatctattgaggctgcaagagccggtgaggcaggaaaaggtttcgcagtcgttgcaaatcaggtaaatgtcctggcagatcagagtgcagaagcggcaaaggaatcagcggcactgatcgagcgctctgtgaatgctgtagaaaaaggtatgatagttgcaaaggaaacagcagcacagttagaggaagtggcagagaaatcaaaaacgatcacaagtgaagtgacaaatatcgcagaaaccttagagacacagacagcagagatccgccagatcaatgaaggaatcgagcagatcaatgatgtggtacagacgaattcagctacttcagaggaatgtgcggctgcaagtgaagagatgagcagcgaagcagataatttacgctcaatgatccgcagatttaaagttgcaaagcataaaaaataatatcagaccagataaattcaactggatgcgcaggagtgtataaacgcaaaagaaaaagggaaggttctctggttatgaataaggatgtatatggaatattaggagatctgacagcagaaatcttattggagatcatagcggaatgcatggacgattacctgtatgtattagacctccagaacaataagatggaaatttcccagtctgccctggatcggtttatgatctctgagacatatatgagaaatgcaaagcaggagatcatgtcggttgtctacgaagaagaccgtgctatgtttgcaaagcatatgcaggctgtgatcgatggaaaggaaaaggtgcatgatatccattaccggtggctcgacaaaaacgggcttccggtatgggtcaactgccgcggagtggtgatcgatgatgaagatggaaagccggggtatctggtgggatgcctgaatgagaccggaaaccagcggcgggctgataatgtgaccgggcttttaggcggaatggaattttgtgattacctgcggtcacagaagaaacctgtgacgaccggatttcttatgcatattggaattgatgattttacagcggttaatggaacacatggcagcaattatggcgactatgtgttaaaaagtgtggcagactgcatgaaagagtgtctgtccggaaaccagagactctttcatctgatcgcagatcagtatgtgattgcagaccttgacagcacttcccgggatgatgccatacagctcaaaaaaaagatcggtgagaaaatagacgaattcatcatctctgaaaaatatgaagttgtattttcagcttccgcaggagtgatcgatgcctcgactgtggcagaaggctatgaggagtgccgcaaaaagtttgaattttccctgaaaatggcaaaacggatgggaaaaaataacatttatttttacaggcaggaagattacgagaaattccagcggaatggaagaatcataagtgcactgagaaattcgattgccaatgggtgtgaaggctttgaagtatactatcagccatcgtggactgtgtttccgggcgtgtgattggtgcagaagcactcatgcggtataccatggtgaccgaggagggggaggaacggctgtccccggtcgagtttataccgcttctggaaatgacaggactgattattccggcggggaggtttttgctaaatgaggcggcaaaaatgtgctgcgagatactgcaatatataccggaattcaaggtaaacgtgaacatttcctgttatcagatcgagcatggcaaaatcgcagataggatactcgctgcagtcaatgacaatggactggcaccggatcacatctgcatagaaatgacagaaagcggcttcatggatatgacaccggctttttgtaaattcaggaaagtgcttgaggaaaatgggatccagttcgtgatcgatgattttggaaccgggtattccaatctccactgcatcagtgacatgaatccgggctatgtgaaaatggacaaggatttcacagcaaaggcaatgagctgcgaacgggattatgagctgtttaaaaagatcattgagatggtccacagcatcggcatccgcatctgtgtggaagggatcgaagaagaagactggcatcttaagatgaaagaactgcaggcagattatcttcagggatatttcttcggaaaaccctgtgaaaaaaagaagtttatggaagagtttgtttacaatctgcgcaataatggcgtatagtgggatagtacctcgcaggaggtgctattttattacataggaaattacttcctatgtaataaaaacgctccgcaaggatgcgactgatgcgcagaagaattatgcaagctaaagcttgcgcgcatcagcgcacaaagagttgcgaagcaactctttgttcttatacagacttttataaaaatttcatatctgcatgaaacggagtataaagaatgaacgaaatagaagttatctggaagttttttgataatctgggtgagtacgtgtacgctacagacatagagacagatgagcttgtttatatgaaccgcaaactgttagaggtgtatggattacagtccatggatgatgtgaaagggatgaaatgttacgaggtgctgcagaaatcttctgttccctgcggcatgtgcaataatgacaggctttgtgccggaaagtttgtcgagtggcgttattataatccggtgatcgataaatacatgatgttgaaagataccctggtggaagatcctgtcacaaagaaaaagtaccggatcgagatcagtatagatatcagcgaggagcgttcacaggacaagatgatccagaagtacagggatatggagtcctttgtcaacgaggcattgaaggatgcgctttctgtcgagtcgccggacgagacgatccgtattattctggaatatctcggaaaagtgctgaacggagagagaacatatatttttgagaagaacagagatggcagggatgataatacatatgaatggacggcgccgggagtgccaccggagatcgacaatctccagaatcttccgccggagatctgtgagaactggtatcgcatttttgaggagggaaaatatgtccagataccggatattgaggagatgcgcctgagcgatccgtttcaatatgaaaatctgaagcggcagaatatccattccattgttgccatgccaatttatgatgcggaaaaagtcattgctttttacggagttgacaatccgccggcattttcattggaatatacgtcggatatgcttcagatcatgggttcttttctcaagtcctgcattagacgcaggaatctgatgaggcgtctggaagatctaagctataaggatgcgctgactcagcttggaaaccgctttgcgatggaaaagtatgtgagacagatcgatccggagcagagcgtgggcgtagtttattgtgacgttaccggtttaaagggtgtgaatgacacactgggacataaggcaggggatgacctgatccttagagccggtgcatgtctggagcaagtgtttggcgattacggcgtattgtatcgggggagatgagctgcttgtattgtgcgcgcagatcgatcaggacacgctggcggaacgcataaggcagttagagtgtctgacagctgaaaaggacgtaaatatcgcagtgggcgtgatctggcaggacagggcggacacacatctggatgaacttctgcaggaagctgagaagcgcatgtatgaggataaggcagaatactataagaaaacagggattgagcggagaggtgcagacaaaaaaggctgaatctgctctcgctaaatgagaatagataaaaaagtgataataattttgtctgaaaaccgtattttcctaggcgaaatgtaaaaaattacaaaatagaaataaaatgattgtgattttgccatgaggtacagtataataagaaatgtcggttaaatgtaaaaatcatgtaaaaagtttgtaaataaaattgcagacagggatacgttaggatgtataacgtagttaggagtacaaatgacaacatttactattattttatcgctgctcagcggagtggcactgttcctttttggtatgtccctgatgggagacggactgaagaaagtagcgggaaataagctggagctggttctttataagctgacgaacacaccgttgaaaggagtgctgcttggaactgttgtaacagcgatcatccagtcctcctccgcaacgactgttatggttgtcggcttcgtaaactccggaatgatgaaggttgcgcaggcgattggtatcatcatgggagccaacatcggaacgagtgtgacaggctggattttgtgtttgtcgtacattgacggctcgaacggaattgcacagctgctgtccacggcgaccatctcagcgatcgtggcaatcattggtattatttttaaaatgtttgtaaaaaaatccggctttaaaaatgtcggtgacattatgttaggcttctctatcttaatggtgggaatgcagaccatgagtggggcggtagcgccattaaaagacaatgagcattttgtgaatgtattgacaatgtttaagaatccggcggcaggtatactggcaggtattttatttacggcggtattgcagagtgcatctgcctcagtcggtatccttcaggcgttgtccatgagtggaacgatcacttttgcagcggcgcttcctattaccatgggtattggtgtcggcgcagcctgtccggttctgctctcttcgatcggaacgaacaaaaatggtaagagaacagccctgatctatctgtttaacgatctgttcggcatgctgttctggtcaattgtattttattctgtcaatgcagtggtgcatttcccgtttatgaatgcaaccatgagcccggtactgatcgcaatgttaaacacggttttccgtgcggcaacgattttagtacttcttccatttatcaaatggattgaaaaaattgtttatcttgttgtaaaagattcgccggaggacgaggaggatcaggcagacttcgatctgctcgaggagcgtttccttgcttacccggatcttgcaatcacacagagccatcttgcgatgaacggcatggcaaagaaggcaagaaagaatattttacgcgcgttaagcctgttccttgtgtattcgacagaaaagtttaataaggtacaggaaaaggaaacgctgatcgataaatatgaggataagctgggaacctatctgatgcagatgtccacgcatgagatgaatggaagccaggcgaagcaggtatccaagtttttgcatacagtgagtgatttcgaacgtctgggcgaccatgcggtgaatatctcagaggttgcggcggagctgaacgagaagaaaattgcattttcggatgaggcacagtatgagctggatgtgctggagaatgcagtaaaagagtgtgtcagtcttgcggtggatgcattctgtgcggacgaccttgagatggcggcaaaagtagaaccactccgcgaactgatcggtatcctctgcgatgaactgaaactgcgtcatatcgcaagactccgcaccggaaaatgtgagatgaagcagggatttgcgtttaatgatctgctgacgaacctggaacgaatcgcagcacactgctcgaacatcgcagttgccatgatcgagcttgaggcagcagactttgatacccatgagtatttaaagagtgtgcgtgaacttaaaaacgacacttatatggcatactttgacgagtatgaaagaacatacgatatcaacggatatcgcaagaaaaaagcaaaagcgcagaaataagataaagataaaacagaaaaagctgtcagattgatacgatctgcttaccggatgttcattgtccggtgaagaggaacttatcagtctggcagcttttttcgttacaggaaactcttggactggtaaaaacgaccggaatgatgtactatgagaaggaatgaaaaacgatattaaaattcgagagaatataaggggaatccatgtcactgcaatttattttcggtaattcaggaagcggaaaatcaacgtttttgtatgaaaaaattttaaaagaggcggcagaacatccggagcagaattatctggtgctcgtgccggaacagtttaccatgcagacacagcgcgaactggtgcgattgcagaagtcacatgccattatgaatgtggatgtgctcagttttgcgcgtcttgcctaccgtgtatttgatgaacttggaaaacagaatctccgtgtgctggaggagaccggaaagaatctggtgctgcgcaaacttgccggagagcagaagaagaacctgaaagtgttaggcggcaacttaaaccgcatgggatacatcagtgaggtgaagtccatgctttccgagctgacgcagtacaacatttctccggaaaaactggatatatttcttgcgtcagaagatatcggcgagacgctgcgtcttaaaatgcaggacatttctgtcatgtatcacagtttttcagagtatcttaagggtcagtacattacctcggaggaggtgctgacactgctttgtgaggtggcagaggattctaatattataaaaaacagtgtcatagcatttgacgagtttaccgggtttacgccgatacagaatcagttgctgcgaaagcttttagtgctttcagaacgcatgatcgtttcggtgacaatggatacaggagaggatttttatcattgcagaggcgagcaggaacttttttccatgagtaaaaagacggtatcggttctgatgaaaatggctgatgagcttcacattgatgtggaggaaccggttgtgttatcggacggaaaaaatcacagatacaaaaatgcaccgtcgctttattttatggagcagaatctgtttcgcccttattatcataaatggaagaagaaagaggacgaactgcggcttgccgacctgaaaaatccaagagaggagctgcagtttgtcgcgcgtgagatcacgaagtgcgtgcgggaaaaaaagtactgctataaggatattgcggtggtgaccggggatgtcagcctttatgacaactatgtggacgagatctttggcgcatatgacattccgtacttcctcgatcagacgagaacgattctgtttcatccgctgatcgagtttatccgtgcggtgcttgaggtggtggagttcgatttttcctatgagagtgtatttcgttttctgcggtgcggtctgaccgacatcacagaaagacagatcgatcttctggaaaattatgtgcttgcctgcggaatccgtggaaagaaaaaatggcaggtgcagtggacgtttgtattaaacgatgcagaaaaagaaaatcttgtggaaatgaacgcggtgagagcgcagatttatgatttctttgcaccgcttgcagagaacttttcggacggaaaaaatgtccgggagattacaactgtattgtatgaattacttgaaaaattacaaatagagcaaaaattaaaacaaaaagagctggaatttgagcagcagggaaatcaggtcaaggcaaaggagtatgctcagatttataaaatcgtcatggatctgtttgacaaagtggttgactttttgggggaggaagtgcttccggtcaaagagtatgcagatattttggatgccggattcgaggcggcaaaagtgggtgtgatcccgccgggaaatgacaaggtgacaatcggagatattgagcgaacgagattaaatcacataaaaatactatttttcatcggtgtaaatgacggagttgtgccaaaagcgggcaataccggaggaatcatctcacagtttgagcgggaaaaaatggcggcgtgccatttagaacttgcaccgggcgcgagggaaaaagtttttattcagaggttttatctctatctgaacgtgacgaagccgtccgattttttatatgtgacattttccaaagtaaatgcggagggaaaggcattaagacgctcctattttgtcggaacgctgcttaaaatgttcccggagaaaacagtggaggaaatcgaggaaacaacttcggcagactgtatcatgacaccaaagagcagtatggcatttttcttagagggcctgcaggaagaagcatggtccggggagaatgaaaaaactgcgtcagaggaagatcagacagaggaaaaactatcaaatccggcaaaaaaagaagtgtggaatgcacttgcgaagttttatctttcagatgaaaactggaaagaggaagcagaccgcctgttaaaagcgtcgtatgtggtacacagtgatgaaccgatcagccatgcggtgacaaaggctctctacggaacggtgttggagaacagtgttacaaggctggagcgctttgcagcttgtgcctatgcacattatttagattatggactgcgcttaagggaacgccagcttttggaatttgcaagtgtggatatgggaaatatttatcatgatgcgctggagcatttttcaaagcgggtggaaaaatcggaatatacctggtttaatatcccggaggatgtgcaggatgcgtttattgaggcgagtatggatgacgcaatcgctggctgcagcaatgccggagcctttgaaaatgtgcggaaccgttatctgaccggaagaatgagagagacaattaagcgtaccgtgtgggtgctcacaacacagatccagaagggaaaatttgtgccaagtgattttgaggtgtctttttcaagggcggataagttagatgccattcgattcaaactcagcgaggaagaaaagatgaacctgcttggcagaatcgaccgtgtggatacctatgagacagcggataaggtttatgtgaagatcattgattacaaatcgggaaatacaagtttttcactggtcaatctttatcacggactgcagctgcagcttgttgtttatatgaatgcggcgttggaactcgaagaaaaaagacatccggggaaaaaggcagaaccggcaggcattttttactatcatattcagaatccaatggtggatggtcttggaaatgagacagaggcagagatacgaaacagcgtgttagagcagttgaagttaaatggattagtgaatgatgacccggaaatttacgaggcaatggataccgattttgccggaaattcttctgtcattccaatcggaaaaaagacggacggaagtctgaaagcaacgtcgaaggttgcaagcacctatgatttttccgtgatgtcttattatgtgcgggagaagatcaaagagaccggaaagaagatatttgccggggatatttcaatccatccatactcgctggacggaaaaagcggctgcgattactgcccataccacactgtctgcggttttgacgcccggatgccggggtattcatatcataagctggaaaaattcgacagcgcggaagaagtgttagagaaaatgaaagaggagcaatagctatgggagtttcatggactgcggagcagcaaaaagtcatagatcttagaaatcgtaatattttagtgtctgcggcagcaggttccggaaaaacggctgttctggtagaacgaatcgtaaaaatgatcacagacaaaagccacccggtggatatcgatcatctgctgatcgtgacatttaccaacgcggcggcggcagagatgcgtgagcgaattggaaatgcgattgagaaagccttagaggaagcaccgggcgatgaacacttactaaggcagttaacgctgattcataatgcgcagatcactaccattgatagtttttgtctttatgtggtgcgcaatcattttcatgagattgatctggaaccaaacttccggatcggagacgagggtgagctgaaattactgcgtgaggatgtgctcggcaaagttttggaacaaaattatgaggaaccttcggaagcattttccgattttgtggaagggtacgcttccgggagaactgatgcagcgttaaatgatatgatccttcagttgtatgagttttcaagaagttatccgtggccgggaaagtggctcgattcttttgttggaacctataaagtcgaaaaccgggaacagttagaccgtgcaaaatggatcaaaccgctgaccgaaaacatctgctttgtcttaaaagactgcaaacatttgtcagagcaggcactcgaactgaccatgcaggatgacggaccggatatgtacgagaaggcggtgcgcagcgatctggaaaaatatgagagtttgtcggaacttacttcgttttgtgagctttcggaggcactttcgaatatcaaatatgacagattggcaagcagcagaggatttgagggagatccggataaattagaacttgtaaaaaatctcagggaacaggcgaaggatgtagtaaagaagttatgtaaacaatattttttctgctcgccggagatgatgatagaacagttggagcgcacagagccgatgttagaggaagttgtgcgacttacaaaacaatttgcagaggaatttgcagaggcaaaacgccggaaaaatcttgtggattttcatgatgtagagcattttgcattgcagattctagtggatgaggagacagaacaggcgaaaaagactgcggaagaattccgggatacttttgaagagatcatgatcgacgagtatcaggacagcaacgaggtgcaggagacactgctccgctctatttccagagaggagcgcggggaaaataatattttcatggttggggatgtcaagcagagcatttaccggttccgtctcgcaagaccggaactttttatgaaaaaatacgattcctactcgttagaggagagcagcacgcagcgcattgacctgcacaaaaatttccggagcagggaggaagttttaagctgcaccaatgatattttttataagatcatggcgcgcagccttggaaatgttgaatatgatgcagaggcggcactttatccgggagcaagctatccggcaatgccagtgcaggaaaatcctacggaaaattctgctggagaaaaagcagcagaagatgaaaaagtttccgggaatctgacaaatgaatttataccggagattttacttgcggacagcaatgacgaattattagaggacacagatttttccgataaaaagacactggaagcaaaaatggttgcagagaagatcagacaattgatgaaaacgcagcttgttacagacaaggcgacaggtgcgcttcgcccggtgcgatattctgatattgtgattttactgcgcagtctgtctggctgggcagattcgctggtagaggtgctgaacgaaaacggaatcccggcgcacaccgtttcatccaccggttatttttctgcggtggaagtgcagaccgtgttatccatgcttcggattttagacaatccaaggcaggatgttccgcttgcagcagtgctgcgctcgccaatggcagggctaagcgatgaggaacttgcagtactgcggctagaaaatggagaggtgccatttcatgaggcggtgctggagctggcggaaacgctgtatgaagaaagcgtagacactcgtcaaaagaatcattcaacagatgcagatgacagccgcgagaaagcagacagatcggcgaaagaaaaaagcaatgcggaggacagtttagaagaaaatggcggcttacaaacagcaacccacgataaattgctcaatttttatataaaatatcagcaattaagacaactcgtgccggatacgccgatccatgaactgatcgagaggattcttcaggaaacaggctatggtcactatgtgtctgccatgccggcaggaaaaagaagaatggcaaacctgaatatgctgttggaaaaagccgcagcctatgagaaaacgagttacaaaggtctgtttcattttgtgcgttacattgatgaactgcaaaaatatgatgtggatttcggagaggcagataccgttggagaaaatgaggacgttgtccgtattatgagtattcataagagtaaaggtttggaatttccggtcgtatttgtctgtggcatgggcaaaaatttcaataagcaggacacgcggagcaaaatggtacttcacccggaacttggcattggtttggattacatggacggaaaaaggagaatcaaatcaccgaccattgcaaaaaaagcgattgcaaagcagatcgatctggaaaatctcggtgaggagctgcgagtactctatgttgccttaacgcgtgcaaaagaaaaattaattctgaccggaacgctaaaagacgccccggaaaaattggaatttttcaggcagcaggctaccttgtatgcacattccagcgacgccacagcgattccgtatctgacaagggaaagtgccgcagggtatctcgactgggtgcttccggcagtgctttcctatggagaaaaatatccggtgcgggttgtggaagcagcagagcttgttttacaggaagtggaaaatcagacagagcaaaatgagggactgatcggacgcatggaagaaatacgtcaggcagatccaactctggttgaaaagttagaacagcgctttgcacagaaatacccatatcagacagatattttgcgaaaaaataaatattcggtgtctgaactgaaacaccgtgccatgcgtgaaaaatttgaagctgagcaggaggagaccgttccggctttcttagaggagcctgtgacaccgacgattcctctctttatccagaagcagggaagcgtggaacaggaggcacaaaataaggcacaggatgcagggcgggatgcagaaagtaaagcagaacagaaaatagtatcaaatacagcaaaccgcggcgcattaagaggtaccgcagtgcaccgtgtcatggagtgctacgattttacttcaggacagagtgtgcatgaacagattttgcttatggaaaaggaagaaaaaataactgcggacatgcgttcactcgtgaacgaacagattgtagcagattttgtttcctcggaaacaggaaaacgaatggcatttgcacaggaaaaaggcacactttatcgggaaaaaccatttgttatgggatttacagaagcagagctggaaagatatggctttggggcaggtgcgcagactgaaaatgcacaactggaaatcgtgtcagaaaatgtgtcgcaggaaaatcatatgcacgaggaagacttaactttaattcagggaatcattgatgttttctggattgaggatgacggaatcacagtcttggattacaagacagatcgtgtggatactgcacaggagctgattgaccattatgcgacacagttaaagctttatgcggatgcgctggagcgggtttttgccacccggaaattaaaagtgaaggagatcctgatctattcgttccggttagaaaagctgatagtgttataaacatgctaatatacaaacattaggaggataaaatgggacagattatacttgcctcggcatcgccgagaagaaaagaattattagagcagattggactggaatttgaaatctgtccggcgaaaggagaggaagtcatttccaaaagcgtgccacaggaagtggtcatggagctttccgagcagaaagcaaaagaagtggcatctatggtaaaagcttatgagaccgggcacgaggaactgatgacaccgcaggatatcttagtgattggcgcagataccattgtagcctgtgatgataaaatccttggaaaaccaaaggatgaagccgatgcaaagcgtatgttaacccttctgtctggaagaaaacatgcggtgtatacaggcgtgacctttgtttttctggataaaaatggtcgtgtgggagcacataccttctatgagagaacatttgtaacaatgaaacaattgtccgagcatgagattgaccgctatatcgccaccggagaaccgatggataaggcgggtgcatatgggattcagggcaaatgtgctatctatatcgaaggaatcgagggcgactacaacaatgtagtgggactcccggttgcacgtatctatcaggaattacaaaaccttggaattgatccctatctatggtaaactacatgaaatagtacattggatgatttctaaattcttttatatcctaaattaaaatttagaaattatcaacaacgcatatgaggagaggagcaaataaaatgcaatatgatgagacatgtttagaatatttcctggcgcatcaggagcagttattcccggaaccggtcgcagagacgccggaggaagcagaggaattcttagaggactgcatggcagttgtctgtaaaaatttaaaagaggtaaaagcctactttgaagatcagggagccgacattgatggaatgtcacttcatgattttgaggaggcaagcgaggtattttctctcccggacggaagatacctgatcgtggaagcttaggtttgtaacgattcagagcctattcgcaaaatcgctctttcagagctttacttttgctcataggttacttcgccaaagaaattttcaaaaatgggattgacaaacgaaaaatagtttattatactcaaaaagtttgcaaagcaaacagaacgagtaagccattttacagcgcaaaaaactgtaaaaaagcattttataataaggagaaactacatgaaaaattatgatgtgattattattggggcaggtccttccggtattttctgtgcatatgagctgattcatgccaacaaagacctgaaaattttaatgattgaaaaaggacgccgcatcgagaacagacagtgtccgaagagaaagacaaaagtatgtgtcggctgtcagccatgttccattacaaccggatttgcgggagcaggagcattttccgatggtaaattatccttatctcctgacgtaggtggaaatcttccggagattttaggatatgatgagactgttacattattaaaagaatccgatgatatctatttaaaattcggagcagatacaaaagtttacggtgtggataaagagaaggaaatccgcgagatccgtagaaaagcgatcacagcaaacttaaaactgatcgagtgcccgatccgtcaccttggaacagaggaaggatataagatttattccagattgcaggaacatctgttagagcagggtgttgagatggagttcaataccatggtcaaagatatcatcattgaagatggccaggtaaaaggacttgtgacagacaaagatgaaacataccatgcaaaagaggttgtttcggcagtcggacgtgagggagcagactggttctcacacatctgtaacggtcatgggatcgagacgcaggttggtacggtagatatcggtgtccgtgtggaagtgcgtgatgaggttatggaattcttaaacgataacctttacgaagcaaaattagtttaccacacacctacatttgacgataaagtgcgtaccttctgtacgaatccatccggtgaagtagcaactgagtactatgacaatggacttgcagttgtaaacggacatgcttacaaatccaaagatttaaagacaaacaataccaactttgcaatccttgtatccaagaattttacaaagccattcaaaacaccaatcgagtacggaaaacagattgcacagctttccaacatgctctgcgacggaaaaattttagtacagaccttcggtgatttcagaagaggaagaagaacgacagaggagcgtctctgcagaaataacctgatccctacgttaaaggatgcagtacctggagatctttcccttgtattcccacatcgtattatggtggatatcgaggagatgatccttgcacttgataaggtcacaccgggtattgcaagtgatgagactttattatatggtgttgaagtaaaattctactcgaacaaggttgtggtaaacagagactttgagacaagcgtaaaaggtcttcgtgccatcggtgacggagcatctgtaacccgtggactgcagcaggcatccgcaaacggaatctctgttgcaagaagcattttaaaagctatggaagcttaaaagaaaagcatgaaaaaaattagaaaaacaatcgcaatgatatgtctgctctgcttttcctttctgctcacaggatgtaagattggaaataaggaagtgatcgtctcaaacacattgaacaatcgccaggtatttcgaatcggaaacgtgtcctgtgggctgaaagaggcgaaggtatatcttgtgaattaccagaatatttacggaactgcctatggacttgatctctggcagcatgattttggagacagttctctggaaaattatgtgaaaaatatcacaatgcaggaactggcacaggtggtctgcttagaccaacttgcaaaagaaaaagaaatggagctttccgaagaagaaaatggaaagatcgcccaggcagcagaggagtactttacatctctcacggaggatgagattgcctatatgggtgtttcggagagtgacatcaaagagtactatgagcattatgcgctggcacagaaagtgtaccactcactcacaaaagcggtgaatgaggaggtcagcgatgatgaggcacgggtgatggaaatcatgcagatttttgtttcggatgagagccgggcaaatgaaattgcatccagattagctcagggagaagattttgcaacactcgccaataactataatgagcttagcagcattcaggtaaatgtttccagagatgaacttccggatgcggtagagcagattgcatttcagatggaaaatgatgaagtttccggtaaaatcacagtggatggaggcttttatttcattaaatgcctgaacaaatacaatcaggagctgacagaggcaaacaaagccaatattgtagacaaaagagaaaaagaagcttttgatgatgaatacaatggatttgtttcttccctgagttcgaatattaacgaagaactctgggagaatctggaacttgagacaggttccgggatgaagacggatacgttttttgaagtttttaatacttattgtggtgatatgtgatatcaccacaattttttcgagggaaaaagatatgacgaaggatatgacaaacggatcgccaatgaagctgattcttggattttccgtaccacttttgtttggatttttatttcagcagttttacaatctgatggatacgttgatcgtaggacgtttcctcggagtagatgaccttgcagcggtaggttccacaggctccgtcaactttcttatcatcggattctgtatgggagtgtgcaacggatttgcgattcctctggcacacaaattcggcgcaggagactataaaggcatgcgtggttttatgatgaacgccatttacctctctgcgatttttgcggtggtaatgacgatcgtgacggtcatcttctgtatgccgatcctggagctcatgcgcacgccggaaaatatcattgacggtgcataccgctacattgtgatcattttctggggaatcccggtcacatatctgtacaatctggtttccggtattatccgttctatgggagacagcaagacaccggttgtttttctggtggtcgcagcggtcattaatattggactggatctgttttttatcgtagtgctcggaaccggagtggaaggtgcagcatgggcaacggtaatttcacagttaatctccggtatcggatgtcttatttacagtatcaaacattttgagatcctgcggccgagcagagaggaaatgcagataaataaaacgtatatgatgacactgtgcggcatgggtgtcccgatgggattgcagtattccattacagcaatcggaagcgttatcttacagagtgcagtcaattcccttggttctgacgcggttgcagcaatgacagccggaagtaagatcggaatgtttttctgctgtccgtttgatgcgttaggttccaccatggcaacctacggcggtcagaatgtcggagcaaaaaaactggatcgagtctccgaaggtttaaaggcagcgtccattttgggatgtgcgtatgcggtgctggcatttgtcattatgatcttcttccgtggggcactggcaggcttctttgtcggaacggcagcaccggaagtggtttccaatgcaggactgtttttattgatcaacagtgcattttatattccgctggcatttgttaatatcgtgcgcttcctgattcagggaatgggctacagcaaatttgctattttggcaggagtgtttgagatggttgcaagaacgttagtcggatttgcgtttgtgcctgtttttggctacgtggcagcgtgctttgcaagcccggtggcatggatctttgcggatgcatttttattcccggcatatttccatgtcctgaaaaagacgaagaagatgttgtacgagtaaaaaataactgcgaaacttcccaccagagtagagcgaattgtgaaaatttgaacaatgtaattaaaaacgaaaggattcagtatgagtattttaaacgtggaacacctgacacacggatttggtgacagggcaatttttaatgacgtgtccttccgtctgttaaaaggggaacatatcggattagtcggcgctaacggcgagggaaaatccacatttatgaatatcgtgaccggaaaactgatgccggatgagggaaaggttgagtgggcgaaaaacgtgcgtgtcggctatcttgaccagcattccacactgaccaaaggcatgacgatcgagagcgtgttaaaatctgctttcgcatggctttttgaactggaagagaagatgaaccagatctgcgataaattaggtgaggcggcaccggatgagatggacgccatgatggaagaactcggcgtgatccaggacacacttaccatgcatgacttttatatcatcgatacgaaggtggaggaagtggcacgcgctttgggactgttagatcttggactttcccatgatgtcacggatttgagcggtggtcagcgaatgaaagttcttctggcaaagcttttgctcgaaaaaccggacattctgcttttggatgagccgacgaactatctggatgcagagcatattgcatggctgaaacgttatctgcaggaatatgagaatgcatttattttgatctcacatgacattccgtttttgaatgatgttgtcaatattatttatcatatggaaaatcagcgtttggatcgttatgtcggagattatgataagtttcaggaagtctacgaggtgaaaaaatcacagttagaggctgcttaccgcaaacagcagcaggagatcagcgaattaaaggattttgtcgcccggaacaaagcgcgcgttgccacgagaaatatggcaatgtcccgccagaagaagttagacaaaatggatgtgatcgaactggcagcagagcgtccgaagccggaatttaattttaaacttggaagaacaccgggacgctatatatttgaaacaaaagatttagtcatcggttatgatgaaccgctgtcaaagccgcttaatatctccatggagcgcggacataaaatcgcacttgtcggggcaaatggtatcggtaagacgacactgttaaagagtattttaggattgatcccatcacttggcggttctgtggaactcggcgagaatttagagattggatattttgaacaggagatcaaaggcgagaacaagaacacctgtatcgatgagatctgggaagaattcccgtctttcagccagtatgaagtgcgttctgcccttgcaaaatgcggtcttaccacaaagcatatcgaaagccttgtgcgcgtgttaagcggtggtgagcaggcaaaagtaagactctgcaagctgatcaacaaatcgacaaacgttctgctcttagacgagccgacgaatcatcttgacgttgacgccaaggacgaattaaagcgtgctctgcaggaataccgtggcagtatccttctgatctgccatgagccggaattctatcaggacattgtgaacgaggtctgggactgctcgaagtggacaacaaagattttgtagtagaaaaagaaagccggacattctatttggaataaatctttttggttaagtgtattgaaaaagaagaaacatatggtgcataagactacagatagtagtaaaatgtttacaaatagttgtaaatcacaacagaaaaaaggggaagattaacctgacagatgccgctaacgcacaggtgcatcagttaaatggatatgtacaggtttctattccaatgccagcgaatattacggtaaaagaaggaaaagcgatcgtcgtttaccgtcttgaggatgatggaacattaacacgctgtgatacaacagtagaaaatggtgtgatcacattcaaaaccaaccatttttcaacctacatcgtagcagaagaaggtgttacagcagttacttttccgaaaacagaagatgccagtgcaggtatcaatctgattttctgcatgggtatcctgcttgcaggagcagcagcagttgcaatgaaaagaaaaatggcataattgaaatagtgcatgagataaaagacagcagttgcccggagaaggtgactgttgtttttttataaaaataagcataaagaaaaggaaaaacattgacattttcatcacaaagtattatcttgatatcagtaataattcctattatcagataacaaaagcaaatggaggccattatgaaagatacctatatttcagaagcagtaaagtatattggagcagacgataccacattagatttatttgagagccagtaccagattccgaacggagtttcttataattcctatgtgattttagatgaaaaagtggcagtcatggataccattgatgagagaaaaacggacgagtggtttgccaaccttgagaatgtgttgaatggaagaaacgtagattatcttgtcatttcccatttagagccggatcatgcggcaaatatcaaacgtgcggcagacaaattcccacaggcacagcttgtattgagcgcaaaggcaaaagcgatgctgccgcagttttttgacatcgcacatttagaagagcgctgccttgtggtaaaagagggcgatacattagagctcggaacacataagcttcattttgtaatggcaccaatggttcactggccggaagttatggtggaatacgaggagacagagaaaattcttttttccgcagacggattcggaaaattcggcgcactttccgcagaggaagaatgggcagatgaggcaagaagatactttatcaatattgttggaaaatatggcgtgcaggtgcagggattgctgaaaaaagcagcagcactcgacatcaaaacaatctgtccgctccatggaccgattttaaaagaaaacttagagtattatattggaaaatatctgacatggagcagctacgagccggaagaagacggcgttttggttgcatgcgcatcaatccacggcaatacaaagacagccgcagaaaaaatggtcgaggtactgcgtgcaaatggcgcatccaaagtagtatttatggatctgaccagagacgatatggctgaggcagttgcggatgcgttccgttatggaaaaattattcttgcggcagcttcctatgacggcggtattttcccgccaatggaagatttcttacaccgtctggcacataaaaatctgcagaaacgtacctttggcctgatcgaaaacggctcctgggcgccttgtgcagcaaggggcatgaaaggcattttagaaggcatgaaagaggtaaacgtatgtgagaatgtcgtaagtatcaagtctaccatgaaagacacagacatttccaaaatggaggaacttgccaaggaaatccttgcttaaagcatataagtgaatcaaacttgcgtttatcagagccaaagagctggaaagaatctctttggctcttgacaatggtaaatagtacggatatacttaaaaataataggggttaatgggttggaggtagtgattatgaagtgtcctttttgcagcagcgaaaacacaagagtcattgactcaagaccggcagatgataataattccatccgccggagaagactttgtgatgattgtgggaagagatttacgacctatgagaaagtggagaccattccactgatcgtaattaagaaggataacgcaagagaacagtacgatcgttccaaaattgaagctggtgtattaagagcctgccataagagaccaatttctgtgaatcagatcaatcagcttgtcgatgaagttgagacagagatctttaacagagaagaaaaagaaatcccaagcacattgatcggtgagatcgtaatggataagatcaagaatctggattccgttgcctatgtgcgttttgcatctgtatatcgtgaatttaaggatgtgaatacttttatgagcgaattgaagaagatgctcgacaaatagggggttcagttttgatacacgaatgtcgataatatactgcgagagaggttttaataatctctgtttagcagagtttgatttgtgatgacagaatgtttacaaagtgtacattctgctatgtatcagtttttaatggagaagattgtatgaatatatcgggaatccgcaccaatgcgggattttatgattacaattccataaagataaatgaggttcggagtcagcagattcaggaggcgaaagagagcagtcagataccggtaacgaacactgcggagcctaaggataacggggatgcgagacagataccaaaagttcagcaggaagatcagggaatcgtggattttaatgcgcggtatcagccggatgcatcctatgaactgaagggaattgacagtgatctttcaaagcttgatgttgagaaagcattgtcagatctgaagaaggatcaggtattacagcagtatcagtttttcgttggcgatgagccattcgcatctacggagaagctgaaacaggtaagagaagaagaaaacttctggttataaagatttatgataccgtatgacattcatacggtatttttctgctttataagaaattgcttcgcaacttctttattaaaaagaaagggacaaacattcatgctggaaaaattttatcccggagaatatttagattccacatatgtgatcaattttgatcagctttacaaagacggatatcgtggaatcatttttgatattgacaacacacttgtgccacatggtgcgccggcagatgagcgtgcctgtgcgttgttttcgcatttgaaggaacttggttttcaatgtatgcttttatcgaacaacaaagaaccgcgtgtaaaaatgttcaatgatgcggtgcaggtgtcttatatttataaagccggaaaaccgaatccggcaaattaccgcaaggcaatgcaggagatggaaacggataccacaaatactattttcgtcggagatcagatctttacggatgtttacggtgccaatcttgcaggaatccgaacgattcttgtaaagccgattcatccgaaggaagaaatccagatcgtgttaaaacggtatttagaaaagatcgtgttgtttttttatcaaaaacggcagaaaaagaaaaaacagttgtaaatataataaagaaaatcaatagcggcaaaatgccgtacagatagaaaagaaaaaggagtcattaaaaatgaaaatcgcaattggaaacgatcacgcagcaacagaattaaaatttatcatcatggactatgtgaaaagtcttggacacgaagttgtaaactttggaacagacggcaatgagagctgcaattacccggagttcggagagaaagtaggacgtgcagttgtaaatggcgaggctgactgcggaattttgatttgcggtaccggagtaggtatctccatcgcagcaaacaaggtaaacggtgtccgtgcggcagtatgttcagactgtgcaaccgcaagactggtaaaagagcataacaatgccaacatcattgcatttggtgcgagaattgtcggaagcgaacttgcaaaagatatcgtgaaagcatatttagatgcagaatttcagggtggaagacatcagacaagaattgatatgatccatgaaattgagacaagaaactaagagagggtaaggtgatgcaagtgggagaacttgagagccgttctctagctgaacaggctgctgataagattgagcagatgataattgaaaatcaatggaatcctggagataagcttcctaacgaaatggatatggtggaaaaactaggtgtgggaagaggaacaattcgtgaggcagttaaaatactggaatctaggaacgtggtagaaatacgaagaggaaagggcacgtttgtatgcaatgatattggaaaaataggagatccgttaggattccgatttgcatcagataaaaagaaacttgcagaggatttaagtgatttccgagcaatgctggaaccacaaattgccaaaattgcagctcaaaaagctacagataaggacatagaggatttacaacgactgtgcgatgaagttgagagtatgatttgtaatggtgaaaattatagtgaacgagatattgagctgcatacaaagattgcaagtattactggtaattcaattgtagaacaaattattccgttaattgcacagggagtatcgatctatgtagatttgacgaatcatgagctcgctggtaccgctgcacttacacatcaaaaagttgtagatgcaattcgaagccatgatgctattgcggcatatgaagcaatgaaagcacatatgaaggagaaccgtgaaaatcttgagttgttaaagaaaaagtgattttaaaaagattaaaattctaaaaaagcattttggaattttaatctttttttgtgtatatttcataaaaaataaaatgcattttttgtgaaaataccaattgaaaatatacatataggattttataatttaagacatcatatgacatgatgatatgattacaaaacgaagaagggggaaatatgaaaagaagtagtgatattttaaatggagcagaatgggcaaatgtaagagcattgtataagtcatcaggttttacagacgatgaattgaagaatccgattatagcggtagtcaatgcatataaccaggtttgtccagggcatgtagtgttaaaacagttaacacaaagagtaaaagaaggaatatatgctgcaggaggtacaccagtggagattggcacaataggtgcttgtgatggtgtggcaatgagtcataaaggtatgcagtatattcttccgacgcgtgaaatgattgcagacgatattgaagcaatggcagaggcacatagacttgatggattggtcattctgggatcatgcgacaaaatagttccaggaatgattcttggagcgcttcgtgtaaatcttccaactgtgtttgtaaatggaggtccaactctcccgggcagaatgaaggagggaaacccatatggtggagaatacatagaccattctattattcagcagtcagagggagcattaaaaagtggagcaattacgaaggaagaatttgattggattgaaaacaatgcagtaccgacaataggttcttgtgctatgcttggaacagcgaacacaatgtgttgtttggcggaagtcatgggaatttctttaccaggaagtgctgcaatccctgctgtgtatagtagaagacaaagtattgcatttgagagtggcaaggcagtgatgaatcttgtaaagaataatatatgtataaaagacatagtaacaaaagatgccatattaaatgcaattaaagtcaactctgctataggaggctcgacgaatgctgttttacacttattggcaatagcatatgaagcaggtgttgatcttgatatttttgaatttggtaaagtaagcatgtcagttccacatatggttccgatgattccggcaggacagtacacattactggatttttatgaggctggaggaattcctgttatgatgaaggaattagcttccatattgatgttggatggtataacatgtacaggacatacttcgaaagaaaatattgatgaattcaaaaataaaaacacagatgttataagaggtttatctaatccagtacataatcgtgggggaatagctgtgttaaagggaaatattgcaccggatggagcagtgacaaagccatccgcaattccggaaaaagcgcttttatttagaggaccagcaaaaatatatgaaagcgaacaggatgcattaattggaatcagggcgaaacaagtacatgaaggagaagttgttgtaatccgtaacgaaggaccaaaaggcggacctggaatgccagagatgtataaagttatgaaagttctagtaggaatgaaccttggaagcaaagtgtgtgtcattactgacggtaggttttccggttctaacaatggatgttttgttggacatatatgtccagaggcattggatgatggaccaattgcatatttacaggatggtgatgtgattacagtcgatgtattaaatggtctaattgaagcagatgttgattttagaaagaggcgaaaagaagttgtaagaaaagaggtagagcaggtaaagggatgtctctaccaatatcggaaaaatgttacaacagcatctaagggagcatacatagcaactagaactgagatagaagataaaacaatataggataaaggagaacgaaaatgtcaggagtttttttagtagttaatctaatgatagcgatagcaattatgattgttttaatacttgttccaaaatttaatccagcattaagtttagtgattgcaagtatttatatgggtgtaacatgtggattaggatttgtaaattctattgaaacaataggtacaggttttggtaatatgatggcaggaattggcttgccgattggatttggtgttattttaggacaattaatgagtgatactggagctgcgaaggtaattgcaagaacaattgtacatgctgtaccaaataagtatgttttatatgcagtagcagcagctggatttatccttgctatacctgttttctttgatgttacatttattattctcatcccgattggagtagctgttgcaagagaggtgaacaaaccacttgcatatgtcgtaggagcattaacaatcggagatggaattgcacaaacacttgtacctccaacacctaacccattggcagcaccaggtatcttaaattttgatcttggaacaatggttattatgggattgattattggcgcgattgcaacattaatatctgtgtttgtgtatactaaaattcaagatagaggaatttttaatgaggaaaaagatgtaaataaagatgctgaaatttatgttgaagaggatttggatgaacttcagaaagtaccaggtttttttgtttccttacttccaattttaattccggttttttgcattcttattggaacaggagcttcggctatcagtgaaaatgtgccatggattgcacagttttttggaaataaaattgtagcaattatgctgggtacactttgtgcatatcttattggttataaatatcttggaaagaataaagtggaaaactctgcaaatgaagcattgaaacaagcaggggttgtattattaattacaggggcaggcggctcgtttggtgccgttattgcagcaacagatattggaaatgcacttgtatctacattgaatattaatagcggttcagttttaaaggtattgtttttagcttattttataggttgtatttttagaattgcgcagggatctggaactgtagcaggaattacagcaatgacaattatggcaacaattgccccaagtgtatcaattcatccggtgtatattgcattggctgcgcttgcaggagggattagtgtaggacatgtaaatgatagcggattctgggtagtgtctaatttatcagggtttaatgtaaaaggtggtttaaaaacatatacattagctcagattataatgtcaatctctataatgagtttaactgttatttttgcattaattcttccaggagcaattggataatattttaaaacgaataaagaaagtaccatctttaagaaaaaggaaacatgcttaaagatggtattttctttaatatgaatgataaagtttgtgtttccataaaaaaagcttgaaaagtgcatctatttattatagaataaagaaatcagagagccttgtgctcgtacgcaattttttaaggaggaagtttgaatgatttcagcaggcgatttcagaaatggtatcactattgaattagaaggtaacatttatcagattatcgaattccagcatgttaaaccaggtaaaggtgcagcatttgtaagaactaagttaaagaatattaagagtggtggtgtggttgagaaaacattccgtccaacagagaaatgtcctcaggcacgtatcgagagaaaagattatcagtatttatatgctgatggagatttatattacttcatggatgttgagacttacgatcagatcgcattatccaaagacgatatcggtgatgcattaaaattcgtaaaagagaacgaaatggttaagttatgctcccacaacggaagcgtattctctgtagagccacctcttttcgtagagttaaagatcacagatacagagcctggattcaaaggcgatacagctacaggtgctacaaaaccggcagttgttgagaccggcgcaacagtatatgttccattattcgttgagcaggatgacgtgatcaagattgatacacgtacaggcgaatacttatcacgtgtttaatgagaataggtaattttaaattacgatgaatgacagacaaccccggaagtttggttttccggggtttttctttgcttattttgtgtttttttgtgtacagcttgactttcccggtgcaggcttctaaaatgtaaattagattagcttagaagatgcaagacaacctttcggttgacgcagaggcagagagcaagggggaaatttaagatgaagatcgtaaatggaaaagtatttgaaaacggcagatttgttgagaaggaagtggcaacagacggaagtttgtttgcagaaacatccggggatgggaaagagattgatgctgctggatgctatgtgataccgggacttattgacattcattttcatggatgcgcaggagttgatttctgcgacggaacggtagaggcaatgcggcatatggcagaatatgaattgaagaatggagttacttccattcatccggcaacgatgacattgtcggaggaggaactgaccacgatcagcaaagccgcaaaaacattccatgaagagcagaaagcggatgcgacgctgcttacaaaagaggctgagttagtcggaatctatatggaaggaccttttatttccatggagaaaaaaggggcacagaacccattgtacgtgcataaaccggatgcagacatgttccgcagattacagaaggaagcaggaggattgtatcatgtctgtgttgttgcgccagaagaacctggtgcaatggaatttattgatgacgtaaaggatgaagtgcgagtatccgtggcacatacaactgcagattatgatactgcaaaagaggcatttttacatggcgcaagacaggtgacacatctgtataatgcaatgccgccttttacccacagggcaccgggcgtgatcggagcagcctgtgataatgaaaatgtcatggtagagatgatctgtgacggtgtgcatctgcacccggcaacgatccgcacaagctttaaaatgttcggcaaagaaagaattatcttaatcagcgacagcatgatggcaaccggaatgccggatggaatctattctctgggcggacaggaagttcaggtacacggcaataaggcaactctcacagtggacggtgcgatcgcaggatctgccacgaatttatttaactgtatgaagtttacagtaaaagaagtcggacttccatttgaggaggtcgtaggctgcgcgacagagaatccggcaaaagcagttggattatgggagaaatacggcagtatcgacaatggaaaatacgccgactgtgtgatcgtggatgaagattttaacatcagacagattgtaaagcacggcaggacaattttataaaacctgtagatttttttacagaaacagagaaaagggcagcctgtagatcatctgggactgtcctttttcataagccggtaaagccagagcagcgcaaggacacagtgcaggatctgactgaccaaaagaccggtcagataacctctgataccgatgactggaatcagaaatacgataaaaagaatccggatgatgcaggaaatgagatttaaaaacagggtgattccgggttttccgagtccgtggaaaatgctgtttaaggtgctgccaaggtagagaaaagggcagatccagcttagtgtcacaatgaaagtggcagagagtgcatttttaaaaataaagttgccaataaaatcgcccagaagtaaaagcccgatcgtacagagcagacctaataaaaggcaggattcagttgttcttataattgctttccggatcagcgtatcgttgtgttttgcctgggcttcagagacaatcggaagtaaaagtacggaaatggaatttgtgagaaccgttggaaacatgatgatcgcaaatgccatgccagtgagaataccatagatacttaaagcatcagaggaactgtagccaaacagtttcagctggtatggaatgagcagattttctatggcagtaaataaattaaaagtgaggcggttaaccgtcagaggaaacgacagggtaagtaatgaccatgtcgtttttcttatattgcccttacaggcgccaaatccgatgcagcttaatgatacaagcatgccggcaatttcaccgagtacaagcccccacacggcgtcagagatcgtaatggaatgaccgttgctctgtgcgatcatataaatcagatagacaccgccaactcttgcagactgttccgccaactgggagagggacggcacaagagtttttttcagtccgtaataatagccgttaatacaggagtggatactgcatggaatatagcagaacgacaatatccgaatcagcggggcacagcgcatttcccgcagaaaagaacctgcgatgaattccgagtaattccacatataaatcccggtaagaatagaaagagacacagaaagaatcagtcccacaagcagatagagtctggctccggcaggattttcgtttccgatttctttggatacaaattttgagatagcagtctggattccggcggaagtcagggaaaaacaaagtgccataacaggaaaaatcaactgataaattccaagaccttctgcaccaatcacacgtgagaggaatatcttatagaagaaaccaataaaacgggagagtatgccggcggatgtgagcagtagcgtaccggtaaatatagttcttttcacagatagattttttgacatttgacctcccgggattttaaatgctgggcactggacggaaaactcagtgctgccaggttcatcaatttagtatatgagagaagtgaggagaaaatgagtaaacagatttatctggataatgcggcaaccactcagatgtctgatgaagtaaagcgggcaatggaaccttatttgcaggaaaactacggaaatgcttctaccgcctatggcattggaggagatgcaagaaaagaactggaaaaatccagggagatcattgcagcaacgttacatgcaaaaccttctgaaatttattttacatcgggaggatcggagtctgacaattgggcagtgaagaatatagcagccgcttgcaagaaaaaagggcggcatatcataacaacaaatatcgaacatcatgcgatcctaaattcctgtgaatatctgcaaaaattaggctatgatgtcacatatctggaagcggacagcgacggacttgttttggcagagcaggtaaaagaagccataagaccggacacgacactgatttctgtgatgtttgcaaataatgaagtgggaacgatcgagccaatctataaaatcgggaaaatagcgcgggaaaaacagatcttgtttcacacggatgcagtgcaggcatatgcacagattccgctctcggtcagttattatccggtggatttattgagtgcaagtgcacataaatttcatggaccaaaaggggttggctttttatatatccgtgacggcgtggatattccttctttcattcatggcggaagtcaggagaggggaaaacgtgccggcacagaaaatgtagccggtattacgggcatggcaaaagcagcggaaatcgcatacggaaatatgcgaaagagggtacagaaagagattatgctgcggaattatctgatcgagcgcatactgcacgaaattccggatgtgaagctgaacggacatcacagcatccggcttccgggcaatgtgaatgtcagctttaagggcatagaaggggcgtcacttttgattttattagatgaagacggaatctgtgcctccggcggttcggcgtgcaatacgggagaagagaggatttcctatgtgatcaaagcgttgggggttccgaaagattacgcaccgggtacgataagacttacattatgtggagatacaacacgcacggatattgatgcggcaattgattcattgaaacgcaatgttgcacttttgcggggatgagagaagattcactaacgcaatgcaggcagatttttttataatctgcctgtattactttcgttaatttccgtttttcctgcatccaatgatgccagaggaaatggcgttttgcgggcacacatccttgcatttgccacagcggatacattccgcactgtttggattttcataaaccttgacacccatatcacatttctttgcgcaaagtccgcatttcgtacatttggcagcatcaatctcgtaatggtagagtgaaaaccggttgaaaataccataaatcgcaccaagtggacataaatacttgcagaaagggcggtatatcattgtagatagaataagaagaatgacaaggatgctgactttccacccaaataaaaagccgatggcacgctgaagtcccggattttttgcaacaagcggaataccgccgagcagtgtgccggacggacagatcagcttgcagaaccatggacttccatagccgctttccccgacaagaagcaaaggcatggcaatgacgaacacaacaaggatgacatattttaaatagcgcagatagcggtcaaatgggacttttttgatctttttgacgaaagggatcttatgcagcagatcctgcacaagaccaaaagggcagagccagccgcagacaaaacgtcccatgagagagccgaagatcattaaaaatccaatgacataaaaggaaaatttataatttttactgccgagcacagcctgaagggatccaatcggacaggaaccgatagcacccgggcaggagtagcagtttaagccgggaacacagagctttttgcttgtgccacggtaaatttttccctcggtaaaaccgatgacatatccatttgtcagggcggtgaaaagaacctgtacccataagcgtaaatgttttcgctgtttttttatccagttcatgatgaaaaacctttccttgtaaattcgtgtaatgtattttctattatccgatgccaatgcattccagacagatgatatttgacttattctgtacagtggtatgctcatttcgatggattccatttaaaataaataaaaccccgatagctaaaagtaagatgcctgtgacagagcgttttttgatattcatataagtttcgcctcgtttcgtgagttccggcagtccgggaaactgccggaaacctgatctatatgtgactattctgctaagtaagagtcaatgagagctttccagccttcatagtccttagaaccttcgatcgtgtcaaggatggttccatctgatccaactacataagtggtagggtatgccataatatttaaaagggattcatttgtggcaagcgttccatccatacgaagctgtgtgtaagatgcatttgcgttactcataatatctttgatctgagccatttcgtcatctgagatacccatgccaagatcaccgtaaagtccgtaaacagcagcacctttgtccttgtattcactattgatcttatcaagatcaggaatttcattgacacatggggtacatccgacattccatacatttacaagtgttactttgttttttgcaaaaatagaggaatccattttattaccatctatatccgtagtatccatgttcgtgaaaatatcatttgtggaagcagtgctgtcggaagcagtctgtgcagtgctgtctgtctgttcagttgtggccgtttcctgtccggctattgtggaagaagtattgccggtggtgtttccggtctgtccgcatcctgcaaaaagaagtgcgcctgtgagtaaaagtgttgcgatagataatgttttgtttttcataataagaaaatctcctttgttttttgttgttcagactattgtctgattgatttgatagacatatcataacgttccaatgtgaaattaatatgaaatcagaaaatttttttgttgataatctttagaggtcataataaactgaaagtagtgttattgttataggaaaatagcacattttaacagtgaagtactaaattaaggaaaaggaaagtataaaatgaatattttaattgtagaggatgatacagcgatccgcgagggcgtggcagagtttttaaaagaaaatgaatatgaggtcttttgtgcaggagatggggagaaggcgcttgaaattttaaaaagcaaagagatacatctggcgctgttagacattatgctgccgaagaaaaatgggattgaagtgttaaaagaactgcggacgttcagtgaacttccggtgatcatgctgacggcggtcacggacgaggaaacgcaggtgcagacgtttgacaaccttgctgatgactacatatgtaagccattttcactgatcttacttttgaagcggatcgaagcacttttgcgggcacgttataagacggaaaatacatggaaatacaaagatgctgtggtggatttttccgggtatcgggcaacgtatcttggaaaagatgcggcagtcacaccgaaagagatcaaacttttagcagtcttgttggagaatgcggggcaggttgtgagccgggatcagattttagaccggatctggggtgaggaggaaagcccttttgaccgtgttgtggatgtctatgtgaaaaatctgcggaaaaaactgcagctcgactgtattatcacggtgaagggcgtcggctataagctggagctgccataaaatatcaataagtgaacagtctgcaaaagaaggttgtattcagcggtgcgcgcagagtaggggattgaatatgaagaaaatgaaattatttcctaaaacatttttatatacgttttttatgctgctttttatcacaacatccatgcatctgatgatttattttttctatccgaaggtgtacttaagccggatgcaggatcagctggaaaagaaaatggacacattgcagcaggagataaaaaggaatactgcagcggaagcagggcagattttttctgattttgcaaaacaaaataatgtcaatgttacggtagagcgtgccggcagtgaagttacttatatgggaatggatttccagatatcactgtataccgatgccgatatggtttttgatgtgagcaatctggaaaatgcggaatcgattattgtgaaaaataaaacaatggaagcagacgacgggattgaaatccaggtggaagtgatggcaagtgccatgccggtgaaagaggcagtggatatgatcacatttttattgccgtttacgttcggagcagccattctcttttccactgttttttcttatttatactcgagacgcattacaagacctatttttcacatgctgaatgtcacgaacgatatgaaaaatttaaaaccggaagtagcatttcatgtgcaggatgaagatgaggtcggacttctggcagagcagatcaatcaggtttatgagcagctgcttgcaacgatccggagtctggatgaagaaaaagagcatatgctcgcagtggaaaagtcgaagactgtttttctgcgttctgcttcccatgaactgaaaacaccgctttccgggcttcggattctgctggaaaatatgcagtataatataggaaagtacaaggatcgtgacaaatatcttgcggaagcagttgccaaagtggatgaactgagcggaatggtcagggatattttagatacttccaaagtgcaggatctgcaggaagaggaaaaacagaaactttgtgcaggcggggaaattggaacagtgctgcaggaatatgcgatgcagatcgctgacaaaaagttggaggtgacagacagtatcccggaagactgcatgctgtttatgagccggaatacatttcagaaagtgtggtcgaacctgatcggcaatgcggtacagtacacagagcagggcgggcagatcacaattgccgcagacacagacaaaatctggatcgaaaacagctgtacaccgttgacagaggagcagttggcttatatttatgagccgttttaccgtgtggacgacacgcgggcagcttccgggggcaacggactgggactctatgtggtgcgggaactgctgaaaaaagagggattccgccatgtatttgagcctgtggaagacggcatgcgctttacgattttcctatagacaaaaactatggattccaaaataaaatttacttgttatttataagaaacaggagtaaattgattcgtggtggtaaaagacatagatatatgatggcatgtaagaggcaccagaaagtcatggaaagggattcatagaaaatgagtgggaatacaaaagaagagacagaacagcaatttgtaagcgaagcaccagtggaagaggaaaatgggaaaaaacgaacggttttccgtggagaactggcgctttttatcacggtgatgatcaacagttttggtgtggtattaatgttatattccggtgcgggaatttccgcaatctccagtgtgccatttgcattttcagaggtggcgccggtcatttcactgggtacatggacgtatatttttcaggcagcactgatcttaagtctgatgatcatgcgcaaaaaatttgttccggcatatctgtttagctttgtggtaggatttgcattcagcgagcttttggatttgcatgaagcgtggattgatattctgccaaaatctcttggattttgcgtattgtattttgttatcagttatctgttgctgtgcattggcattgcgttttctaaccgctgtggattgccaatcattccgacggacttgtttccgagagaattatcacagattacaggcgtgcgttattccagagtcaaaataggttatgatgtgatctgcttgtgtgtgacagcagttcttaccggctgctttttgggacatttagatggacttggcattgggacagtgctggcagcatttaccatgggaaaagtgatcggaatgatcggaaactggatggaccagagatttcagtttgtatcggttctgactgcaaaatcataaagtatccagaaatttcctcggatattaagaaaaaattcattaggaaaagggaacaatctatagtataatgatggtcacatcacaatggattgtgaaaatgaatttttgggcgtctgcgcacgccggaatgagagggaatatgaagagaaaaatagcatggattctgctggcggcaatgacactttccattgctgcgtgtggaaataaaaccggagattcggttgcagatgatggaaatatcactgcagaggcaacagagggtgcgctggatacatcggcaaatctggagggaagctgtgcagacattctggatgagatttataaaacagcaaaaacagatgacgattacttcagctacacagatgattttgaaaacgtggagattaccgaagcagaagaagaatatattttaggaacgacagagattgattatacggattccgtgtactctgcaccgatgatgtcctcgatcgcttaccagtgtgtattgctccgggtaagtgaagatcaggatatcgaagctgccaagaagcttttagaggaaaatgccgatccggcaaagtggatatgtgttgaagcagagagcgttgttgtggaaaacgttggcgacgtgattttattcatcatggcagacaaagatgttgcagatgcagcaaaagaagcgtttttagcgttaaaaaaataaatacagaaggtggtgcgaagcttgcttttttcaagtattacgtttttatactattttttaccggcggtgttagtgatttattatctgacaccggcaaaaggaaaaaatctgatactgtttctggcaagcttcgttttttatttgtggggggagccaaaatacagtgtgctgctccttttttctgttacagccggctatatgggtggaagatgcatcgaatatcagagacagaggaaagaggcggctttttttattgcaattacattgggactgctggtgttttttaaatatatggattttctgatggaaagtgtgaatatgatttttggtacacatgcgcctatgatgcagatcgcacttccaatcggaatcagtttttacacgttccagatcatcagctattacgtggatatttaccgtggagaggtgcaggcagagcgtaatttcattgactttgcggcttatgtgacgatgttcccacagttgatcgccggaccgatcgtgcggtttcagacggtgcaggcggagttgaaacaccggaagatcacatgggaaaatatcggtaatggtgcggcatgctttgtgtgcggtctttgtaaaaaagttttgatcgctgattcacttggaatgctggtggcagagttggagaagattgcaggaatcggaacggtgggatactgggtgcttgcgatcgcatttatgttacagctttattatgatttttccggttacagcgatatggcgatcgggcttggcaggatgcttggatttacgtttcctgagaatttccagtatccatttatttcaaaaagtatttctgaattttggcgcaggtggcatatgacgcttggagggtggtttcgcgattatctttatattccactcggcggaaaccgggtgggcgttccgaggtggtgtctgaatatgtttatcgtgtggcttttcagtgggttatggcatggcgcaggctggaattttgcattgtggggcttgtattttggcgtgtttttaagcgcagagaaattgcttggcaaacagattggaaaaagaaccgggaaaaaaatcgcaggatcacatttgtatgtcctgcttgtggtgctttttagctttgtgattttccgcgtggagagcataagtgggataaaagagcagtttttgggattatttggttattatggaagtgcaatgacaccgttagctgcttatgaaatgaaaagttacctgtttttacttttgatcgcatgtgtcggagcaacgcctgttgttaagaacggagttcagaaatttcaaaatacagtcgtctggaaaaaagctggctggctgctgcagagcagttgtattttaatcggtctgattctggcaactgcatttttgcttggaagcagcgtgcatccgtttttatatttcaggttttaggagggcggaaaatggagtggaagaaaaaagtagctgcttgtgtttttctctgttttcttattttggttccggtaactgcttttttgctgccggatcagaaaacatcaaaaacagagcggagacagctggcacagaaacctgaatttagcgtgaaatcattttcagacggaacatatatggagcaattggaaacgtattttttggaacagtttccagcgagagatgtttttcgcacgataaaatcggaaacagagacaaacgttctcggcaaggcagacgcggacgggtattttaaagtggaagatggcgtttaccatttagaggcagaactaaacgagaagaatgtgaacagagtggcaaaagcaatagaaaaactgtgcgaggaacagttcgcggaatctgactgctatgtggcagtgattccggacaagaattattatctgtcagaatataaggatgattcagcgcaggatgttggtaaacaaacagagactagccagaaaaagaaggaaggaaaaagtgggtatccggtacttgattatgacaggctggatgaaatcatgcaggaacagatcaattcagcggagtttatcagcctctatgaccaactagagctgagtgattattaccgcacagatcttcactggaaacaggaaaaacttacagatatagtaaacacgcttatgcagagtatggggcaggagaatatggcattatccggtgaatggcagactgccaccgatcagtttcagggagcttatagtgctgcgtcagcttttttaacaaaaccggacgccatttattatagggagaatgagcttacagatcagatgcaggtttacgattatgaaaaacagcagacggtgagtgtctatgcgccggagaaaattggtggaatggatgattatgatttttatctgtggggcgcaagggcgctgattaccattcagaatccgcagtgtcagaatggaaagaaactgttgctgttccgggattcttttggcagcagtattgcaccgcttctggctgaaaattatgaggaggtgacactggttgacttgcggtatgtttccgcttcgtatgcattggaacttttaggggataccaagtatcaggatgtgttgtttttgtatagcgtacctattttgaatcatggggatagtttgagactggggtaaaaagtttgaaacattgtgtaaccaatcagatttatttgcgtctttcctgatgaaaggaaatatgagagaatgaaagcaacgaaatctatccgtgcaaacaaaacggggagaaaaagagggtacatgcgatggaagatgaaaagattatagatctgtattgggagagagatcagagtgcaatcacacaaaccgcggaaaaatacggagcgtattgtggcagaattgcaaaaaatattcttaccagtaaagaagattgtgaagaatgtgtcaatgatacatggcttcgggcgtggaatgcgatgccggacgaaagaccgggtattttgtcagcgtttttaggttcgatcgcaagaaatctaagtctggatcgataccggaaacagcatacggcgaaaagaggaaacggggaggtggatttcatttttgatgaacttacggatcatgtggataaaaaagaaccctcccattacatagaagaacaggaacttgtgacgtgtatcaatcatttcttaaaaatgctgcccaaagaacagcgggtgatgttcgtgcgaagatactggtattgtgacaatatcacagcaatcgcagagcgctgtatgtgcagtgagagcagagtaaaaacgacattattccgtatcagagggaaaatggtggattttttgaaaaaggagggatacgcaccatgaaaaaaacagattggatggatgccattggaaaaattgatccggtttatgtaaaagaagcggagcagtggaacaaagcggcacagaaaaagagaacaatcagacatttcacagcgatggcggcatgtgtgtgtgttctgctgatcggggcagtttccacgtttaccctgttttttaacagaggcgataaaggtacagaaacggcagcaggaatggcagaaccggaacagcaggaaagccagatcgcagaatccgcagataccagtgtcgaaacagcagaagcggcatatgaggagggcgtgactgacacagaggcagtgactgcacaggcagatacaaacgagaaaatcacaatgaatcaggtagaccagttaaatactgtcgcaatcgacataggctatgcgagggagacagttttggatgcacaggaattagaggaacattatggagtaactattttcccggaaaatctgccaaaagaactgacagcaaatgcagggcaggaagaaaccgctacttcttatgtggataatctggtgcagacgttgcagggcagccagaaggtggaagaagcaggttttacaggaattattggctataatgatgccaatgaagtggtagctgataacaatacatttttctatgagagcgtggatggaagcaaaagtcttgaaatcagtgtcagaacaacagaatcaggtgagattaccgaatttgcggatgacaatttaaaaacttcggttgtcaatgataacgaagtgacaattgcgcgtcttgcaggcgatgatgaatgttatcttgcgatttttacgaaagagggggtaacgtttacagtccagacaaaaaatctgaccgaagcggaactgcttatgatattgctggaattgtgttgattatttaattgataattgcaaaactctaaaataaggtggattaaattgttaattcctcacaatcttctcaacttgaattggcgttttgcaattacctgcatcaaagaaggagggagaacaccatgaaacgaaaattagttacaattttaatcggctgcatgacgattggtttacttggctgcggcagtgaccaagcactgtccggttccacaaagaagctgacagccgaacagacgaaagacggcggacaggatgaagccgatgcaacagagcaggaagattccgagcaggttaattctgaccagaaaaataccgaggtggcaggaggcagcgaagatcagacaacaatcgggcttaggaatcggcagtttgcggttaagctgttgcagcagacctatcaggaagggaaaaacgagatgatcgcaccgctttccgtgcttgcagcgcttaccatgacagagaacggtgcgaagggcgataccttgacgcaaatggaacaggttttatcgggcggcatgcaagccgaacagcagggcaaagaactttcttcctgtatgaagaatttaccggataccgaaaatgcgcatttgaatgttgcaaactctatctggctgaaagatgcagacactttccatgtggaggatgatttcctgagaaagaacacggaattatttgatgcggaaatttttaaggcaccgtttgatgacagcacgttaaaggatatcaatacgtgggtttccaataagaccgaaaagatgattccggagatattggatcagattgaaaatgattctgtgatgtatctgatcaacgcagttgcctttgatgcaaaatggcagtctccgtatgaaaaagaggatgtgcaggacggcacttttacaccggaaaacggaggcagtcagagcgtcgatatgatgtactccacagaggactattatctggaggatgacagtacgacaggctttatcagaccttacgaagaaggttacagctttgtcgcactgcttccaaaggaaggaatcagcatgagcgattatatcagccagatgagtgcagaaaagctggtaactgtcattgcaaatgcaggcacggattacgaggtggatgccgcgattccaaagttcaagtcggaatattcggtagaactgaatgacactttgaaaaatatgggaatgacagatgcgttcgatcctgacaaagcagactttagcggaatcggaacgagtggccgtggaaatctttacatcgatatggtacttcataaaacgtacattgaggtagatgagcagggaacaaaagcaggagcggcaacagtagttggaattgcagagtacgcctcgttggagacacctgttgtcaagaccgtgcatttagaccgtccatttgtctacgcgattattgacaacgaaacgcagatgccgattttccttggtgtgacggaaacgattacacaataaaaattttttgtgacaaaaatttttatcagttcatgcccaaaaacagtaaaatcgttaaaaaattaacatgtacgaaaaaagatacttgagattatggcagaattcctttatacttattctcggtctgacaggaaagagaaactgacctgaatatttatttttagaccagaaggagaatttaatattatgaagaagaaacttgtatcagcactggctcttatgatgtcctgtgtgatgctcgcagcatgcggcggtaacaaagtggatgagaacgtgacagttccacagaccgaaaccagcgaagcagtcacagaatcagcagaggaagcagtaagtacagaaataacggaaaacacagagacaacaggcgaactgaccgatgtgaatgtagctgccttaaaaggaccgacagctatgggaatggtcaaattaatggatgattccgacaacggagataccggagcaaaccattataattttacaatctcagcttccccggatgagatcactccacagatcgtacagggaaatattgacattgcggcagttccggcaaacctcgcatctgttttatataacaaagacggcgtggatgtcagcgttttagcagtgaataccttaggtgttttatatatcgtggaaaacggcgacagcgtgcagagtgttgctgatttaaaaggaaaaacaatttatgccagcggaaaaggtgcaacaccggaatatgcattaaactacatgctgaccgcaaatggcattgatcctgaaaaagatgtgacgatcgagtacaaatctgaacattccgaatgtgtggctgctctcgcagcaaatgaggatgcagttgcaatgcttccacagccattcgtgaccgtggcaatgacacagaatgaaaacatccgtgtggcattggatctgacagaggaatgggaaaatgcttccggtgagggagatacaaaagcaactttaattaccggtgttgtcatcgcaagaaatgaatttatcgaggcacatccggatgcagtggatacatttttacagcagtacgaggcttctgtgaactatgtgaacgacaatgtggcagatgcagcagttcttgttggaaattatgatattgttgtcacaccagttgcagagaaggcaatcccggaatgtaacattacctttattgcaggaaatgacatgaaggaaaaattaagcagttatcttggaatcttattcgaacagaatccggcagcagtcggtggagccgtaccaaatgatgatttctactacaacgcagactaggaagaaaaataaaataaagctttggaccattgcattctggctgatactctggcagtttgcaagtatggcattagacaaacagatattactggcatcgcccctttccgtggggcggtgcctgatttcgttggtgcagacatattcattttggcattctgtctggttttccatggaacggatcgcagcaggttttttctgtgcggtagtaaccggcgtcatttgttctgcgttagcgcatcatatttcatttgtgcgtgatatactggcacttccggcagcagtgttaaaggcaacaccggtagcgtcctttatcgtgctcgttttgatctggatgccctcgcggaatctgtccgtgctcatttcctttatcatggcattcccaatcatttacacgaatcttctggaaggattcggacatcttgacagagaactttttgaaatggcaaaagtatttcggatgacattcggaaacaggctgtattacctttattttggcggattgttttcttatttccggtctgcctgtgccattgcgatcggtatgtgttttaaagcaggaatcgctgcagaaatcattgggattccgaaaggctcgatcggtgaaaaactctacaatgcaaaaatatatctggagacaccggatttatttgcatggacgtttgtgatcattgtggtgagtgtgctttttgaaaaagtatttcagtggacattgtcactgctggcgcggaaattgaatgtacggtaaggacgtagaaaaaatggatattatagtgaaagatttatgtaaatcatatgaaaatcaaaaagtgttagatcattttttctgtcggtttcaggaaggaaaaatgacctgcattatgggaaaatcgggcattggaaagacaacattgctggcggttttaatggggcttgtaaaggctgacgaaggagccgttaccggaatggagcataagaaaatcagtgcgatttttcaggaaaaccgtttatttgaaaacctggatgccgtgacaaacatccgcattacgaccggaaaatcagacgcagagattgaacgttttttacagaaaatggaactaaaggatatcattggaaagccggtaagtgagtacagtggcggcatgaagcgccgtgtggcaattgcaagggcgcttttggcagagtatgatatccttttcatggatgaaccgctgcaggggctggacgcctgcacaaaagagaaggttgcgcttatgataaaagagcagacaaacggaaaaacggttctttttgtcacacacgaggaaaaagaagcagagttttttcaggcagagcgtgtggaactttgttaaaaatgtcagcggttcatctcagcctgatagccggacgtatttttgtgctggtcgataatgctgtcaatctcctctaaatctgtaaataccatgtcgccaatgacgctgtgtttgatcgcagccatggcattaccgtattctaacgctctctggcagtcgccatgtttcaaatatccgtaaagcgcgccggatacataggcgtccccgcttccgatacggtcaacaacatcaatgttgttataaggattttcccgatagtaagtatcttcttttgcggaataaataatagaagtaaaattatgtttcttcggagtgatcacggtacgctctgtggaagcaacaacagaaatcggatattcctcgcagaaggatttctggatttcgttgatcgtgccggtttttccgaaggtaagtcttgcggtatcttcggagcagaagaaaatatctacatacggaagaatggtttcaatgcattttcttgcttcctcaccggtccagagattggaacgatagttgacatcaaaggagatcagtgttccctgttttttgaattctttaatacagtgaatggcaaaatcctgtgcctttccgccaagtccgagtgtgattccgcttgtatggaacaggcgtgtattgtaaaaaagtgtctgtggcacgtctgaaatctcaatattattgatagaagagtgctttctgtcatagacaacacgcggttttctcggataagaaccatattcataataataaatgccgatacggctgtcgtcagaacggtcttcaatcaggtaattttcactgactctggaagcatttaactggtttttgataaatgcagccagcagattatttggtattttggagatgatagcggtatttaaaccgagctgcccaatctcagatgcaatatttaactctgcacctccaagatgtttcatcagtgtgtcgccctgtgcgagtctgccgtttatcggtgttgaaagtcttaataaaatttcccctaatgtgatcacatcatatttacgatccataacaagtacctcctgttgtttgaaaaaatgtggctgctgttttgtggaacagaatcattatttcatatgatagaaacatatttgttgcaatattttacacaaatagttttataatatgaaactaagttctataatacgaaccactttcaaatgcattataacgcaaaaaagcaaaattgaaaagtagttattgaaaaaacatgtttgacatttgcaggattgatgttataataaagttacaaattatgaaacacagttccattatacggaacttatgaatttaaaacatggaggaaataaaaacatggcaaagaaagtcgttacatttggtgagatcatgcttcgtcttgcaccagaaggatattatcgtttcgttcaggctgcatcttatggcgctacttatggcggtggagaggctaacgtggcaatctctttagctaactacggtgtagatgcaagtttcgttacaaagttaccagctcatgagatcggacaggcaggtgtgaactctttaagacagttcggagttgatacttccaagatcgttcgcggtggtgacagagtaggtatctacttcttggagaagggcgcaagccagagaccttccaaagttatttatgaccgtgccggatctgcaattgcaacagcaacaacagcagattttaactgggatgagatttttgagggagctgactggttccatttcacaggtatcacaccagcacttggcgataacgtagctgcaatctgcttagaggcttgtaaagctgcaaaagcaaaaggaatcacagtaagctgtgacttaaattaccgtaacaaattatggtccaaagaaaaagccggacaggttatgggcgagctttgcaaatatgttgatgtatgtatctccaacgaggaagatgcaaacgacgtattcggaatcaaatctgaaggtacagaagtaactgcaggtgagttaaacaaagccggatacaaagaagttgcacagaaattaacagaccgtttcggatttaagaaagttgctatcacattgagaacttctatttccgcaaatgataataaatgggcagcaatgttatatgagaacggcgagagctacttctccaaagaatatttaatgcacattgttgaccgtgtaggtggtggagattccttcggtggcggattaatttacgcttgcttaaatgattatgctccacaggatacaatcgagtttgcagtagctgcaagctgtctgaaacactctatcgagggtgacttcaaccaggttagcgtttctgaagttcagaaattagctggtggagatgcttccggacgtgttcagagataatttattttgctataaaggtctttgctgatttttagcaaagagacatttataattcctttccctaatttaatatatgtcattagtgaatcacccagttcactgatacgagaaagtcgtgcatagatatgtacggcttttttgttttatacaatatagacaaaaatgctccgcaaagctttttgacagttttcacaaaattgagaaaatgaaaaagaaatatactgacatttgtgaacttttcgtgttaaaatcgaatagaaaggagaatcatggaaaaatgtttgaagtaggagaatatattgtttatggatgcaaaggtgtctgccaggtagaggagatcacacatattgatattcccggcagcaacaaggacaggctgtattatgttttagctccgttagaagacagaaacgggaaaatatatgcaccgacggataatgcgaaagtaacgatgcgcaaagtgatcacaaagcaggaggcagagcagttgatcgaggagatgccacagatcgaggaattgtgggtggcgaatgagaaacagcgtgagcttcaatataaggaagcgttaaagacctgcgattacagagcgtggatcagtattatcaagacattatatttccgaaaaaaggagcggatcgctcagggcaaaaagataacatcgttagatgaacggtatttaaaagcggcagagaatgaactttatggggaattgtcattgacgcttggagtatccaaaagtgaaatggaagactacatctgtaaacgccttgaagcataggaagcatcacaggtcagcatggatgaacatgaaaaaaagaaaatggctatgaaaaaagaaaaatcgtacaaacgaaatatgaggttcctgttcgcaaagctcacaaaggaaatcatatttgtttgtacgatttttctttttattaaactccgttttacttcagaatttcgcgaacacaatctgcgatcgcatcatctttgcaggaagcgaagaagtactccgcaaaatgttctccgctcaatgcgtctttgacaagatcatgacctgatccggttgaaacaggtcatcaattaaaaattatttcactaactctaaattaaaattgaaatagttcactgcgttgttgtaggaaattccgcggacgatttcctctaaagtctcataatcagcaggatattctccgttttctacccaggtaccgatcagattgcagagaattcttctgaaataatcgtggcgggtataagataaaaagcttctggaatctgttaacattccaacaaaaccggaaaggtttccaagatttgcaagggagatcatctggtcagtcatgccggtcttatgatcgttgaaccaccatgcagagccctgctggatctttgcaacagcagtggaatcctggaaacagccaaggattgtaccgatggactggttatcgtttggatttaagctgtataaaatggtttttggaagctcgtctgtactgtttaatgcatttaagaaatctgccatctcagaagatggagcatagttattgatgcagtcgtaaccggtatcaggaccaagtttgttgaacattggagtgttgttgtcacgtttgcatccataatgaagctgcattacccagcttcttctggcatattcttttccaacaaaaaccataaatgctgttttgaaaatgagttcctcttctcttgtgacagaagctccgccaagacgttttgcaaaaatagattctacagtctcagcagaagcaggagcgtacataacgtactctaaaccatggtcggacacggagcatcccatggaagcaaagaaatccatacggttttttaatgcctcacataaagaagcaaaggaatctactttgatgccggaagcttcagataacgctgcaaggtaatcaggataagcaggtttttcgatattcattgctttgtcaggacgccatgccggaagaacctgaacatcaaagctgttgtcttctgcaatctttttgtgccactctaagctgtcgacaggatcgtctgttgtgcagatcaaagttacgttggactgtttgatgatgctgcggacagacatggatgggtctgcaagcttttcattacagagattccagacttcctccgctgtttttttgttcaaaacaccgtgatatccgaaatatttctgcagttcgagatgactccagtggaaaagtgggtttccgattgcttttcctaagcactcagcccatttgaaaaatttttctttgtctggagcttccccggtgatgtagtattcatccacaccacaggaacgcatgaagcgccatttgtaatggtcgccgccgagccatacctgagtaatgttttcaaactggcggttctcgtaaatctcctgcggattgatatggcagtgataatctaatacaggtgttgtcgctgcataatcaaaatataatttctgggctgtttcgttggaaagaagaaaatttctgtccataaatggtttcataataagtacctcctgaaaattaaaataatgttgttcctcgttttatgatttttccagagaaaatcgatttttttggcatttcctctccggcaagaacgccgagtaatgtctgtactaactggtgcgtcagggtttctaaacggttgtcgacggaggtcaattccggtgtacagcagtttgtcagcatggagttgttgtatcccataaccgaaaggtcttccgggatacggattccccgcttttgcgcatatttgatgctgccgatcgcaagggaatcgtcggaagtcatgatgccatgaaaagacgcacctttttttgcaatgcccgctacaaagtcagcgatttcgtcgagatgttcaatattgccgtcataaaaatgaataagcttttcataatctggaatattgtgttctttcatcgcatcacggaatccggaaagcttctttttaccactgtaggacttggaatcatataaataaaggatatccgtgattccagcctggatcatttcggtggctgcctcaaacatggttccataatcatcacagagtgtactgtaaacattcggatgatcaaaggaagcgtttaacagcatgatcggaacctgcgtggaaacatccttaatatactggttctcatcctcggtggaaccgatgaaatgcgaacctaccaatataatgctgtccacctttttggaaagaattaaattaaggtaattcttcttgatgtccagattataaccggtacagcataaaagtgattcgtatccgttcgcctgtaattcctgctccagaaagtagactgcctttgcgagaaaaaggtcagacgagtctgcacagagaataccgatcgtttttaaggaatgaagtcccatgccgcgggcaaaagcatttggagtgtaatcgtatttgtcgatgacatccatgacttttttccgggtggatgggcggacgttttcactgtcatttaaaacacgtgatacagtggcgatggaaacaccggctttttttgaaatgtcgtaaattgtcattgccatagtaaatcccctgaaaaatatactccatgtaagaaatggattttcttacactataataaagctgcttgtgtattataaaaatgaaagcagttacaccgcaaccacgaatattatacatcaagcaaaaaataaagcaacaaaagaaatgataaaaacaataaaaatgttaaaataatatgcgcaatatcaacaaaaatatgcgaaatacacaaaataatcgaaaatacttattgacgaaatgaaacaagtctaagaatacataatgtaaacgcttacatagccaaaacagaagcgtcagataattacataatatgaaacagtaaaagacatactattccaaaaagcagattatgcaaggaggaaagtatgtctttatttattaaaatcattgatgttcatgcaagagaaattttagattccagaggtaatccaacggtcgaagtggaggtgacagctgagacagagacaaccggaaaaaagatcacagcaagggaatcggtgccgtccggggcgagcaccggacgttttgaggcaatcgagcttcgggacggggaagagcggtattttggtcttggtgtcagaaaagtggtggatcatgtgaaccagaagatccgcgaaaaactgattggctgcaatgtgttagatcaggcggcaatcgaccgtatcatggtggaagaggacggtacagacaataaagggaatctcggcgcaaatgcaatcttaggtgtttccatggcgtgtgcgaaaaccgcagcgaaagcgttggaacagccgttgtaccgctatctgggcggaacgactgcacacattcttccggttccgatgatgaacgtgatcaacggtggagtgcatgcaaaaaattcgattgattttcaggagtttatgatcatgccgaccggtgcactggattttaaagacgggcttcgcatgggagcggagatctatcatttcctgcggcagattttaaacgaagacggactgagtaccgcagtcggagatgagggaggatttgcaccggacttaaaggaaacaagggatgtctttttatatttgcagcgcgcagtggaaaaggcaggataccatgtgggggatgatgtggtttttgccatggatgcggcggcaagcgagctatatgatgaggagacagggctttatatttttccgggagaatccagagaggctggaaaagaaccggaaaaaggcgcaggagaacactctgcaaaatattactgtaaagacagtgtgaaacgaagcgcagatgagatgatcgcattatatgaagaactgatcgaggaatttccaattgtttcgattgaggacggactgtttgaggatgactgggaaggctggcagaagatgacaaagcggatcggagagagagtacagcttgtaggggatgacctttttgtgacaaatccaaagcggattaaatgcggaattgatttaaacgtcgcaaatgcagttctcattaaagtaaatcagatcggaaccgtcacagaagcgatggaggcgatcgagatggcaaaatgtgctggttatcaggcagtgatctcccatcgttccggggagaccgaggatgcctttatcgcagatcttgcggtggcagtgaatgccggacagatcaagaccggtgcaccgtgcagaggagaacgaaccgccaaatacaatcagttactccgtattgaggaagagttaaaagaatctgcaagatatgggaaagccgagataatccgaaagaaataggagcctaaatggctcctaatttcttgctcatcatttccgggttggaagcatttgcaagagcagtttttttatcgatgatgcctttttgataaaggcggaaaatactggtatccatagctaacatattctcgttggtggaggtgtagatcatgccgtcgatctgatgtgtcttgccttcgcggatgagattgcggatagcaggggttaacaccatgatctcaaaagccggaaccattttaccgtcaacagttggcagaagacgctgggatacgactgcgtgtaataccatggaaagctggactgcaacctgatgctgctgggtggcagggaatgcgtcaatgatacggtcaatcgtattggcagcgcctatcgtgtgcagcgtggaaaaaatcagatgtccggtctcagcagccgtcatggcggtattgatcgtctcatagtcacgcatctcgccgagcaggatcacatccggactctggcgcagggaagcacgcagggcagtcaggtaattttcggtgtcggtacatacttcacgctggcttacgatgctttttttatgggtgtgcagatattccaatgggtcctctaaagtgatgatatgggcttcctgttcggtgttgatcttgtcaataagacatgctaaagttgtggattttccaccgccggcaggaccggtgacaagcaccattcctttgttggtattggcaagttccataactgcgtccgggatcatcagttcacttggctgtggcagtgtgaatgtgatgatacggataactgcagaataagaaccacgctgtttataagtgctgacacggaatcttgacacaccgacaatggcaaaagagaaatcatcatctccggtggcttcaaactgcgagatgtcacggtggtcggcaagctcataaatggctgagacaaagtcatggcacatatccggcatcatgcgcgcgtcctcataagtgtgcatttttccattgaccttataagttaaaggacggcctgctacaacaaagatgtcggaagcatgttcttttgtaatattttctaaaatttctctgacgttcattttcatgaccaaacctttcttgaattaattgcctgaaaacagatgcagtgtatcatctgccgcaggttcgttggtagtgacggtctgccactgtgtgattttataaaattcatctccgggatgctccggataagaaagcactaatgtgatttcaagctgttgtacttcattgatcgtaacctgaaaagcacaggtgatctggctgtctgccacggtagtttttacatccgatatcgtatcggctggtgtgaggctttgcatcacttccggaagaccggaaaaaaagtgttccctgtcactgcactgttcataaagatcagaaagtgcggtatctaactgcaacagatagttttttgcagcggtgtcagcctgatagtaggcagttgttttatcggcagcttttttactcagcctgtaatcagaatttgcagtgatcagcgagagcgtagcaaaagttacaaggcagagcatcgtaaagaccataaggatagaggaaaagccgatatggataaatccctgttttttcttattcatattgcatacctcctgttgtacctagagatatcggctgatagcaggaggcggaaagctcgtaaataatgtccgctttgtcgatatcaaaaaaggagatgtggatcgtgcgaagttcatccggtaaaaaatcaacggtcgcgcggtaaacggcatcctgctttttacaggcaagaaaatctttatcgtagtagatcaataccgtttcgttcaggctcatggattccggataaatggaacttagcgtatcttccggtgcatctgcactctgacagatctctgtgatcgacgtgcaggcggttactgcctgatgaagccttgaggttttttgtgagagttgataccctttaaaaaaaatctgcacacagaatgtcgcaagaaccgaaaaaaacaaaatatttaaaataatctccattaaaaaaagactggatttggaatgttgatactggttcatgaaaactccttttgcaaatccttattgttttgcattcagtgagatataaagcggataagtgtatccggtatggtcggtaatggtaaagcagtacaggttggagctgaccatgtcgatcagaagtctgtctgcttcgatgatcttctgcccgtctccgggagagacgaccgtatcggcggaaacagtgatctcgcgcagatatccgtcgtagcagtaaatataggtcgtgtatacattgtcatttaagttttctgataaggcgatggcaggggcagagccgacggaggataccacgacagagcctgctacatcattctgattcattttttcttccagataagaggatacggtgcgggtttcataattagtggtcatgctgtctgcaatggacttgtactgtctggcgccaatggaaacaagcaggaaggcggtagcagcaaaaagtgctaacaaagccagtatgaaaatccggtcgatcgtatgcgctggtgttttctttaaatcaagcatagaaatcagttccttttaataatagtgacatccggtcttaaattagcgccgatgtactgatagtcgatcaggtacagatcggtgtcataagtcagaccatagtgttcggtgagataagcaatgtcgggaggatagcttccctccaatgcgtaacattctgtgatcgttctggtaactgctttttccaaaatagcggtctgttccgtttcgttggaaagccggattctgtctgcaagaaaacagaacagaaagagcaccagaacgagaaggacaatagaacacacatagtgtcgatatcgtgtttctttttttgcttttgatcgtgtcatataaaaacctcgttgtctgtatttcccattaaccgatacttgacataatgccaatgagcggcagcaggaaagagatcaggatcaatccgatgaaaatagataaaataattactaatgtcggctctaatattgagatgaacttcgcaatctgtttgtcggtttcttccgcatattcatcagaaatcttgtgcatgacttcatccatggaaccggtcttaaaaccgatcgtgatcatggaagcgtagattttagcgaaaatatccgaagtcaggatcgcatcttcgaatcctttgccggaggcagtcagatcacggcatttcttaatgcgggaagccatataaggattgtcaacaagctgctctgcaaatagaagtccctgatctgtatcaagtccgctgcttagggcaagtgccatacagttggcaaaacggctggaagcagtgctcatggcaagagaactcttttttgcaattcttctgccggtttcggatcttgtaaaaagaaaaactgcaatggcggctatgatgaaaaccagaataatcgcgatcagatactggtttaaaagatcagaaaaacggatcatagttccggcaaaaccggtgaggtcgcttcctaattctatataaatctgatgaaaaacaggaagcaccttggcaatcagtaccagaatgactgcaagcatcatggcgatcatgatgagagggtaagtgaccgcatttttgatactgttttgaatggtttcttctcttttataatactgtgtcagtgcagtgagcacttcttcaagttttccggaggtttcgccaatttcgatcatatcaagcacatattttggaaagactttcgtttccttcaatgcgtcacagaacgaactgccctgatcaagagaactgcttatggaagaaaggattccggcagtcgcctcatccggtgcgtcatcgtgcagaatggagacaccctcatagagtgggattccggcagagacgatcatggagagctggtcacagaaagaagcaatttcaagattgcctaacatctgttgtttctttttatacataagagaaaacctcctgttaatagacatactttgtaatgtactcatccgtctgggtgaggaaatctttcggatcggagcttgtggaggcgaaagttggatccataagcttccagtcatttccgtcaaattcgataattccgtttacccagcctttgtctttgatgtaagtactgatccatgcatggtagacatcgcccatataaccgacttctaagcgggttggaatccgctcacagcggagcatggcagccatgacagcggcataatcaaaacagatcccggtctgctttgctaacacatcatccacatccggcagataaccgctctgcacagatgcagccttgtcatagtcataagtaaaatttgtaatgatataattatagacattttcaattacttccagatcatcattcgcagatgaagaaagctctacggctttggcaactgtttttgattgtgccgtaaaattcacatactggtttgcatacagatagggaccaaattcatcctggatcgtcacatcaagagtctgcgtaaaaagagtggaataactggtgccttccatattttcaaagactccgacggtgtaggaaccgtttccggaagttaagggaaaagtttcatacccgtcatgtaaattatatgtgtaagtaatctcatcagaaccggtaatctgtaatttgaccttcggattggaaccggagtatgaaaccataaggtaaccattctctgtatgggatgcgtctatggtgacggaatcatttccgtaagtaaccgtgccgtctgcactgcctgtcaggacaaccggtgtgttgtcgcgcgaaccactcgcggcagcaggggaagaattgtccgctgctgtggcagaagtctgtggatttgagccgttttctgtgtctgtggtattaccgcaggaacaaagaagcaggcaggcgcataaaagtaatggaagtaatatgaaagagcccttggatttggggttcatattgtttctccttaaacattcttttttcgtggcagacaaacatatttttaaaagctgccagcgtttatcagttacgtctattatagtgtatgagggataaaaagaaaatgataaaaaatgtcgaaaaaacaagaaagaagaaacttctttttccaattccgcagtacactggaactgatcaagctgatggatggcgccattacagcagaagaaacaaaaaacagttgaaaatgtggcgggtatatgttatactgcttaaagttgtgagtttataaccataggaggaagataaagtggcagttttaaaaatgatcttaacagttatttttattataattagtattgcattgacagttatcatcttaatgcaggaaggtaagtcagcaggacttggagcaatcgcaggagcggctgatacttactggggcaagaacaaaggacgttccatggaaggcagactggtaacaggaaccaagattctggttgtcttattcattgtgattgctgctgtattgaatttaggaattttttaagaaacgtaagagactgtcgtgaatacgatggtcttttttctttctgggaaattgtaatgcaatattcctacaaagaaaaaatagtgtatagtatttttgacaattcacatacttagataaaatggagaagatatgaacaaagaattattacaggaacgcaagaaaatgatctacgagtttgtctgtgatgacctctatgtgccaatgaaggcaaaagagatggcagttgtgctcaatgtgccaaaatcacagcgtggggaattaatagaggttttagatgcactggttgccgacggaaaagtggaggtgacaggcaaaggaaaatatgttaaatcagaaggcaaatacctgacaggtgtttttacggcacatccgagaggcttcggttttgtgactgtggagggggaagaagaggatatttttattccgggaacacagactaacggggcacttcatatggatactgtgcaggttgcactctcaaaaaattccagcggaaagcgcaaagagggtacggtgacaaagattttatccagaggaaccgagcagcttgtctgcacttatgaaaaaagcaagacatttggttttgcagtgccggataatccaaggtttgcacaggatatttttatcccgcaggaacgctctaagggcgctgtctccggtcataaggttgttgtagagatcacagactatggcaaaaacgggaaaaagccggagggaaaagtagtcgagatcatcggccacatcaatgatccgggcaccgatattatgtcgatcgtaaaaggatatgatcttccggtagagttttcgcaaaaaatcatgaaacaggttgaaaatgtttcgaatgaagtgagcgaagcagatatggcaggacgtatggatttaagagattatcagacggtcacgatcgacggggaggatgccaaggatttagatgatgcgatcacgctgacaaaagagggcgatctctatgaactgggtgttcatatcgcagatgtatccaactatgtgcaggagaacagtgcgctggatgtggaagctttgaaaagaggcacatccgtttatcttgtagaccgggtgatcccaatgctgccacataagctgtccaacggaatctgttcgttgaatgccggggagaaccgtctggcgttaagctgcatcatgaagattgatgaaaaaggaaatgtgatcgaccacacgatcgcagagactgtgatcaaagttgaccggcgcatgagctatacaagtgtgaaaaaaatcttagaagaccacgacgaggcagaaatcgaagaatataaagagcttgttccgatgttcgagcggatgaaggaactggctgcgattttaagaaagaagcgcatgaagcgcggctcgattgattttgatttcccggaaacaaaaattattttagatgagcagggaaaaccggtggagatcaaaccatatgacagaaatgttgcaacgaagatcattgaggatttcatgctgatcgcaaatgagacagtggcacaggattatttctggcaggaacttccgtttgtttaccgtacacatgacaatccggacacggaaaagattaagaaactgggtactttcattaataactttggctatacgattcatatcggacaggatgagatccatccgaaggaattacagaagcttttgatgaagattgacggaacgccggaggaggcactcatcagccgtctgactctgcgttccatgaaacaggcaaaatatacgacagtcagcaccggacatttcggactggcgaccaattattactgtcattttacatccccgatccgccgttacccggatctgcagattcaccggatcatcaaggataacctgcgtggaaggatgaataagaagcggatcgaacattatgaaagcattctgccagaggttgcaaaacattccagcgagatggagcggagagcggacgaggcagaacgtgagacagacaagcttaagaaagtcgaatatatggaagaacgcgtcggtcaggtgtttgagggagtgatctccggtgtgcaggagtggggattctatgtagaacttccaaacacggtggaaggactggtgcatgtaacgtctctgaccgatgatttttaccattacgaggagtcgtcctatgagatggtgggagaacgcacaaacaggcgttataagcttggccagaaggtaaaagttatggcagtcaatacggataaaatcatgagaaccattgattttcgtgttgcagaatgttaacttctgggttatactgtaacagcagcaggaggtaaaaccatggcaaagcaggagattaagttaatagcgaacaacaaaaaagctcaccatgattatttcctcgaagagaagtatgaagcaggtgtggaacttcatggtacagaggtaaaatcccttcgtatgggaaagtgcagtatcaaagaggcatttgtccgtatcgaaaaaggcgaagtgatcatttacggaatgcatatcagtccgtatgagaagggcaatatcttcaacaaagatccactgagaccgaagaaacttctgatgcataagtctgagatccggaaactggtcggaaagatcgcagagcagggatatacacttgttccggtagaagtttatttcaagggaagtctggtgaaagtacagatcgcacttgcaaaaggtaaaaagctttacgacaagagacaggatattgcgaagaaggatatgcgccgcgaggcagagcgtgacttcaaaatccgcaatcttggataaaaaagaaaaaagagcatctgtaaaaagatgctctatggtcttaatgaccggaaaatttatgggcttgtaatggtttcgacagggatcatgaagctggagaagcgagtcgcacgggatgcgtcaaattccacaattaaaattaaacgctgaagataatttagcatacgctgcctaatttggcagcagtctgacccagagcacctacactttgggacccaggcttcgactatgtaggaaacgacatcagcaaagctttgagctgttgggcgtattatgaagctactgaaggcattcggttgtttgttcctggatgtcggagggaatgtttaaggataaactaaactcgtagaaggacaggggattggtttttggacacgggttcgattcccgtcaggtccactatcaaaaaagtgcctgaaatcttggaaaacagttgatttttctgggatttcaggcgttttttatggttcggatatttgttgaaattatattgtgttttataaggtaaatgaagaaaagaagaaagttatgatttgaaaaatttttacactcattttttctggggtatgttataataatagcatcataaaagcatcataaaagcatatcaaatacaggaaagagaaagcgatgaaagaagtaaaagatatatggcagttttttgaaaatatgaatgaatatgtgtatgccacagatatagaaacgcatgagattgtatacatgaaccggaaaatattgcaggtatatggtttacgatcacttgaagatgcaaaaggaaaaaaatgctatgaattattacagaaaacattgattccttgtggtatgtgtaacaatgacaggctgagtgtgggcgaatttgaagaatggcattactataatccgatcattgaccgctatctgatgttaaaggatacgctgatcgaggactctgccaatgggaaaaaatatcgtgttgaaattggtgtggatatcagcgaagaacgcacacaggacggcgtaatccaaaaatatcagaacatggaatttatgatcaacgaaggtctgcgcattgcacttcagacggcaacgccggagcaatcgatcgaagttattctggaatatttgggcaactcgttgaatggggaaagaacctatatttttgagcgcaacgagcggggcagggatgataatacctacgagtgggtcgcggaaggcatttcgagggaaaaagagaatttgcaggatattcctccggaaatctgtgcacactggtatcggatgtttcaggagggaaagtttattgtctttaaggatcttgaggaaatcagggagagcgatcctttacaatatgagaatttgaagcgtcagaacattcattcacttgtggtggttcctttgtatgatgatgggaaagtaattgctttttacggtgtggataatccgccgcctccatcattggagtatgcatctaatatgcttcagattatgggacattttctggtgtcatgtatcaaaagaaggaatctgatgagcctgttggagaatatgagctataaagatcagctcacaaaactcggaaaccgtttcgcaatggaaaaatatatcaatgagatagatgcggaaaagagcataggtgttgtttattgcgatatcacgggattgaaacgtgtgaacgattcaatggggcatgaggctggggatcagttgattcttcgtgcctgcgacagtctgaaaaaagcatttggagagtacggtttgttccgtatcggtggagatgaactgcttgcgttgtgtgcaggaattgaacatgctgcattgatggaacgcattgggctattaaaagaatgcatgaaacaaaataatgtaaatatggcagtgggagaaatatggcgtgaaaaataccagacagaattagatacattactgcaggaatctgaaaagagaatgtatgcagataaagaagcatattataaaagaactggaatcgatcgcagaaaatagcagatattcgggtatttcaaaaagttctatcttcggatggaactttttctttggctctttttataaaagaaaataaaaatataaaaaaagtacttgacgaaaatggaatgctatggtaatattctgtcttgtccacggaatataaatgttttagaaataaaaacaatttataaaaaagtctgaaaaaataaaattaaaaaagctattgacagataaaaataactgtggtataacaaataagtcgcttgaacagagcgaaacaacaaagaacattgataactgaacagtgaataaccttgaaagattctaaagcgaataaattcgctcagaagaaatcggagatttcttccgggttttgaaataatcaagttcgcgagtaataattcaagtcatcgaaagatgaacgaacagcttttaataaagcaaaccttaaaacagtaaattggaatttatttctgatttggaaaagccagatattctggctggattaaaacttttaacatgagagtttgatcctggctcaggatgaacgctggcggcgtgcttaacacatgcaagtcgaacgaagcactttacttga

SEQ ID NO: 14400 - DNA, 1014 bp, Unknown
  gut microbiota DNA sequence
attaaaacaaaatggtataaaaatatgtatcgcaacagggcgcccgtttgttaccataccaatgtttgaggggattgtatttgatgcgattttggcattcaatggttctttctgcgtcgcaggggatcaagtagtggcaaaatgtcctattccgaaagaagatgtaaaaaaaattattgaaaatgcaaaaagaatggaaagacctgtttctattgcaactgcggaagaaattgttgcaaatggaagtgataaagatttagaagattattttgcgcttgcacaccatagggtgaatgtatccgaaaaatttgaagaatatgtggaaaaagatgtgttccaaattatgttgggatgtgacttagaagaacgcaagtatatattagagggaacgaaaaatgccaaagtagcagcgtggtggagtagagccatagatattattccaaaagaaggtggaaaaggaactgcgattgaacaggttcttgcacattataaattctcaaaggaagaatccattgcgtttggagatggagaaaatgatgttgaaatgttactatccgttggaaaagggattgcaatgggaaatgcagctgaaaaagtgaaagaaattgcggctgatatttgtgaaagcgtgacagatgacgggatttattattatctgaaaagccagaagctgataaatgagtaaaagataggtggaaaataattccaaataagagaatagtacctgtcaaagaatctttgcgtaacgatatatgcaatgtaaggtgttgattgttttactttgaacattattttttagataatcgtatttcgaaggaggacgtaatattatgaatataggaaatcaaatattgaacatccgtaaagaaaatcaattaacacaagaggagtttggcaaattatttcatgttaccagacaaactgtttcgaattgggaaaacggaaaaagttatccggatctgcaggttctcgtagacataagcaatcaattgtagaatttttcacaggtgcagg

SEQ ID NO: 14401 - DNA, 1150 bp, Unknown
  gut microbiota DNA sequence
agaactatagccattattgttggaattataatgataggcataggctggtataaaaagtcaaagaatgataaaaagatatttcaatatatgaaagaacagaataattttgaaaaaaagtattgaccttgtagtttgtacagggtttagaatccatgctgtgaaacgaaaacatggaggaaaaagaatgaatatcaaagaagtcgagaaagttacaggaatttcaagccaaaatattaggttttatgaaaaaagcggactggtacatccggaccgtaatgaagagaatggatatcgtgagtatgatacaaatgatatcagaatactaaaactcataaagatgtttcgcatgatcgatatgccgattgagcagattaagcttatattgtctgagaatcaaaaactgccacagcttttgaatgaacaggagaaaatgttagagcagaagctggaaaatacaagatatgcaattagagtatgtgaacatttgaaggaaatgtgcagctcagtagaagatattgatgcagatttgtatctgagccggatggaagaagaatcagatcattacttcgataattggaaatctgattacaaagaggtagtgaagtatgagcatgaacgcatatttacatttgttccggaagaggaagtgacggacagatatacttttgaaaatgcattatatgcgtatgcaatggaaaagaataagcatataacaataacaaaaagaggaatgtatccggaatttgtcatggatggagtagaatataaagcggagcgaaattacactgtgatcgcacgtatcccaacagcagtcattcgctgtacaaggaaggatgctccggaaaaagataaacagtacagacatggcagaaagaaatggataagaatattacgcatatgctggccggctgtgataggaatgcttttattgatttttttatggggaaatgtgttattttcaaagactgagggaagaattgctttacttgctatcatgatagtgcttttggcaatgtctgtccgtaattacttattatattggaatttggattaagaattacttacggagtaatgttgaaaaagatatatgcaggatcaataccagtctgaaaggaagttacagttcgcagggtaacctgtgaactataac

SEQ ID NO: 14402 - DNA, 593 bp, Unknown
  gut microbiota DNA sequence
gttaaatgcgtcacagacgtaacgaacaacatcatattggcaattatgaactttggagaaatactcaagtggccgaagaggtgcccctgctaagggtataggtcgggtaaccggcgcgagggttcaaatccctctttctccgctcttatttgcaatatatgttgttcgaattttttttgaaaaagttgttgacaaacgacagacgatttgatagaatatcaaagctgtcagaaacgacaacacatcagcttgaaagagttgaaaaaagaaaaataaaaaagttgttgacaagcacagctggttatgataatataacagagttgctgaaaacaacaaagaacattgataactgaacagtgaataaccttgaaagattcataagagaataattcaagtcatcgaaagatgaacgaacagcttttaaataaagcaaaccttaaaacagtaaattggaatttatttctgatttaaaaagccagatattctggtttggatttaaactttaacatgagagtttgatcctggctcaggatgaacgctggcggcgtgcttaacacatgcaagtcgaacgaagcactttacttgatcttttc

SEQ ID NO: 14403 - DNA, 862 bp, Unknown
  gut microbiota DNA sequence
taaagcaaaccttaaaaacagtaaatcggaacttgtttctgatttagaaagccagatattctggctggatttaaactttttaacatgagagtttgatcctggctcaggatgaacgctggcggcgtgcttaacacatgcaagtcgaacgaagcactttacttgatctcttcggagtgattgttttgtgactgagtggcggacgggtgagtaacgcgtgggtaacctgcctcacacagggggataacagttggaaacggctgctaataccgcataagcgcacagtaccgcatggtacggtgtgaaaaactccggtggtgtgagatggacccgcgtctgattagctagttggcagggtaacggcctaccaaggcgacgatcagtagccgacctgagagggtgaccggccacattgggactgagacacggcccaaactcctacgggaggcagcagtggggaatattgcacaatgggggaaaccctgatgcagcgacgccgcgtgagcgaagaagtatttcggtatgtaaagctctatcagcagggaagaagaaatgacggtacctgactaagaagcaccggctaaatacgtgccagcagccgcggtaatacgtatggtgcaagcgttatccggatttactgggtgtaaagggagcgcaggcggaaggctaagtctgatgtgaaagcccggggctcaaccccggtactgcattggaaactggtcatctagagtgtcggaggggtaagtggaattcctagtgtagcggtgaaatgcgtagatattaggaggaacaccagtggcgaaggcggcttactggacgataactgacgctgaggctcgaaagcgtggggagcaaacaggattag

SEQ ID NO: 14404 - DNA, 49154 bp, Unknown
  gut microbiota DNA sequence
atacaagtatagcttaaaacaaatagacctaaaatggataaattagaattcaagaataaaactaatcaaagccattttgactaataatatttgtcttcatttgatttaatataaagttatgtggattatgctctcgtttacctcactttttgtagagaaacgggaaaagagaaggatactaaaacagatatttatacacctgtatacatattgttctgtaaaacaaagatttagaatattatgtaaaaaacaaaaagtgagaacatggatataatgatacaacttaatattaattgttattcatagattagtattgtataaactcatatattagaaaaacatgtaaccttataatatcattttgtatatttaggaatgtgtaactctgtacgatataaaatcttcctattagcttgaaaagaatatttctattaatagtgaaaattttcgtagcactctttttgcacatattttctatttatacaggatgaaccttattaaaaagccaagattgttttaaagcaaagataaggggctcttttaagaacaaatttatgttatttaggggctatcgatatcttttcagtgaagataataaatttagtttcattttatgaacagggcagcggtgagtgttacaaaatgttatacgtctattatttctttcagtagaagaaaggtagaaaacaattattttcatactcttagaatggcttaaataaagaaaaacagataagactttagtgtattaaatactgattatcaataaattaaataactgattagttctgcaaagactttggtggtttcctttatcgggatggctagtcaagaggtttctatcaaacagaatgttagcatcattttaaaatctgatactaaagtgcttggagaagtgatggttgttgcatatggtactgcaaaaaaggaatcttttacaggatcagcatccgttattaataataagaaactggaattacgtcctataagtaatgttactaaaggattggaaggacagactacaggtctgttaacaacttcaggctcaggtcaacctggcgaagctgccaagatcgtgattcgcggttacggttccatcaatgcctcacaagatcctttgtatgtagttgatggaataccttttagtggagatatgagttctatcaatcctgccgatattgaaagcatgacagttttaaaagatgcttcagccggagccctttatggagcccgtggtgcaaatggtgtaattatgattactaccaaacaaggaaaagaaggcaagactaaggtatcttggcgttctacggcaggttggtcttcacgttccttgaaagcctatgacatggttgaccaaaaagaatttgtacagttaacgtatgaaggtttacgcaacggatatatctttgacaatggatataactgggaagctgccggtagacaagcatcagcagatttaggtggcgttttaggtggagaacaatataatccatttaaaaattacacatggggaacaattatagatcctgcaacaggtagagtgcagggtgatgctacatccgcatggaatgaatcttggatggatgcaatacaaagagacaatgcatttcgtcatgaacaccagttgtctgttaatggaggtacagaaaagaccaaatatatgttctctttgggatatttaaatgaagatggcatcttgattaataccggtttccaacgttataatgcccgtgcaaacataaacacagaagtgaataaatggatgaagactggattgaatgtgtcactttccaattccacacaaaatttcagtgattacgaaggttcatctaattcaaatgtgtggtactctgcacaatttatggctccgatttacccggtgtatataaagggagaagatggtaaagatgtattagatgccgatggaaatcgccaactggactacggtgacggtagtgtacaacgcccacagtatagtgatttcaatcccgtaggcggtttggtagatgacaaggctgatataaaaacagatgtagccggtttgcgcacatttttggcattcggctcagattcggaagatgccggatgggctaaaggtattaagctgactttaaactttggtctggactaccggaacaaatctcaaaaatcatatatgaatatgcaccatggtaatcaggcagctgccggcggtttgttgatgaaatataacagaagaacccaatcttatacttttaaccagttactgacatgggggcgttcttttaactttcataacatcgatcttttggttggtcatgaattttatgcatacaaatatgaatttctgtctgccggaaaaaccaatttagtagatggtattcttgaattgcgtccgggtacaaatctatacaatgcagactcgtattcggaagattatcgtgtggaatccttctttgggagattcaattataactttaatgaaaaatattatttttcagcctctatccgtacggacggttcttcacgcttccaaaaagataaccgttggggtactttctggtctgtcggtgccaactggagaatttcacaagaaaagtttatgcagaatttgacttggatttctaatttatcagctaaaatcagttatggtgaacaaggtaatgataatctgttaagatatgatagtcttgaaggaggatatgtaccggattattatccttggcaaggactctatccattggaatatccgaatgccaatcaagtaggaggtctgatcggtgctttggaaaacaaaaaactttcatgggaaaaaagcggtaatttaaatgtcggtattgaggcaagtatgtttgacggacgcttgaatgttagtgctgaatattataaccgcaaaacaacggatatgttgctgggataccctaaggctacttctagtggattctctgaatacaatgcgaatatcggttctatgcgtaataccgggtttgaatttagtttaggtggttcccttatcaaaaccactgattttatatggaacttaacttggatgggctctactgtaaccaataaagtgctgaaactaactggggaatctcctgaaattatcaagggagttttcagtattaaagagggaatgcctattaatacatattatatggctaaatctgccggtgtggatcctgcaacaggagcgcagctctattgggtatatgataaggatgataatggcaacatcactaacgaatatatcagcagtgactatcaaaaagctgcgaacagcaaatattattccggcagccgtatacctgatttatatggtagtatcaataccgatttctcttacaagaatttcgatttgtcaatattgggtacatattctataggaggtaaagtttatgattcattatacgctggttctatggaagttatgtatgcaggcaatacatggaacaaacatgctttgagacgttggcaacaacctggtgacatcacagatgtacctcgtattcaaattggaggttcctacacagcttcagaccgttttttagttgatgcttcatactttgctatcaaaaatatcactttgggctacactattccccaacaatggctaaagaaggccgggctagagtctgtccgcatattcggatcggtagataatctcgctttattttctcatttggacggtatggacccacagtataacttcaagggcgaaacagactattcttatgctcccaacaagacttattcagtaggttttgaaattaatttctaacaatttaaaagaatacaggaaagtatgaaaaaaatatttaaatacatatttgccgggatggctgcaatgtctgtggtagcttgcagtgaggatgctttggaaaccagtccttcatcttctgtttctggcaacgaattattaggaacagcaactaatgcattagtatcattgaatggtgtatatcgagcaatgtatacagcaggggtttcaaacagctctaacactcatcaatgtttcggtatcacagcttataatctggtggcagatgttatgggtgaagattgcattatgaacggacaaggtagcggctggttttggtatgattgcgtttacaacgtaaaatcaagatatacctctaccggatggcgttcttatgatatgtggaatggctattacacttggatttctaatgtcaattacattttggcagaagaggaaaccatgtctggaagtgaaaccgaaaagaattatgtgcttggacaagcctacgctgtacgtgcttacagttattttatgctggcacaaatgttttctcgcacttataaaggacatgaaagcgaaccttgtgtaccactctatacagaaccgactgatattgcaacagaaggtaaagggcgcgcaacggttgaagaagtatatcaacaaatcacttcggatcttgacaaagcaattaccatgctgggcaactcaggtaaaagaaaacatatcagccatatcaatgaggctgttgcctcaggtataaaggctcgtgtcgctttagtgatggaagactggcagaccgctttggatgccgcgaatgccgcaataagcaaaagtgggtgtagtatcggcactggaactgcggtaaccggtggaatgaatgatgctactgccaataatgtgatgtgggcggccgaaatcatagccgaccagtccggaatgtatgcaggtttctttacacacatggatgcggatcaagggaaatatggagctagtgctcgaaaacagataaacaaactgctttatgcaaagctaggcacaaatgatgtccgcaaaaaatggtggaatccacaagacgagaataatgaaaagaatggttaccaacaagaaaaattcaagtttaaagattatgcgaaatggacgggtgactatatttttatgcgtattgaggaaatgtttttaaccgcagcagaagcatcttgtcgtttaaatgatgacaaaggcgcacaactgatgttgaacagtttaatgcaaaaacgtgatgaggattacacttgcaaaaaaacaggaacggcattaggtaagctcacctcagatgaaactggttctttacttgaagaaattataattcaacgccgtattgaactttggggagaatttggacgtatctatgatatacgccgtctgaaacaagggttcagacgtactgcagacatgggctggccatccagtgctttaattgctggtacagatacggaagatcctgagtcgtatgcatgggtattaactattcctcaaacggaatttgatggtaatccgaacatggatcctagcaaagatcagaatccgataggtgatcataaatagtattaatctgtaagcaagtaaattatgaaagtaaataaatatataatcggcatgtttgttgccactgcaactttttttgtatcgtgcaacaccgacaatgaaggagatatatacaatagcacaacaatgggggtgacattcgccacaggcacacaatcggtttcctttccttccacaggatatgagggttttgatgtagaagtcttacgcgcgaaatcttcggaagctactacaattaatttatcagcaacattagttgtcggtgataaagagcaggaactccctgcctccattaccgtaccttcctcggtttcattcgcagcaggggaatttaagaccaatattcatgttacagttggagatataactcctggacagaattataaagtcaagatatctttgccggaggaaatggttacgatagaccagacttcggataaagtcataactgtttatagggattatactttttcttcattaggaactggaacatttaaatctgcggctatggcagaggaaggagaagattttgcaacttgggaagtggaagttcaaaaagcagaccagatatcatggtataaagctatgaacttatatgaaaaaggatataacattgtcttcaaagttaatgaagccaatgaggtcactgtagaatctcagccggcatggaagcacgcatcctatggagaagtttttgtttcaggcaaaggtgctttggaagacggggttattactgtgaagctgtcgcatgatgtacccaatgttggtggttttggtgaatttaaagaaatactttacctacctgctaaataatttagatttaagatatgaggaaaagatgaaactttctccttaattatccaataaattattacccaagtatacaaaattaatgtatacttgggtaaatctatatagtaaatcggtctttagaaattattgataaacatctgttaactcgaattcgattactatataaatgtgcttgtaaagacatatatgttaaatatttagttacatatttggaaggaacacaacaaaccaccatcaatccttatgaactgattgtaactcctgacgggaagtcaaattttgattacacacggaatcttccatcagtttttttaatgttcttctcagccaaaactcaaaaaaacgatcatagaccggatgtagcatattatgccgtcaaacagttgatatatttcagatataacatttttattaatgtacttcccgtttttctggaaatggtgtgtaacaaattttgtatattctttcagtctgatagattgtaaatccaaaatcatagtactttgataaaaaagccggaagacttataaaaatttctcccgtcatatgacattgtgaacataaatatataaatggacattgtacaatgttatatatagatgctcaaaatggctttaacgttctttcccggatattgagcgataacttgaaattagtcaatcgctactaggcagattttgtctgcttttcctagatagctaagtatttcgtccaaagtaacagacgttttttgctctctcccatttctaaattccaatttggatttcctctttcattatttcatgcattttttttgcaaaaaaattataatcttattataatacaatcattataatgagatttatcacaattagacttttttatcgtataaagtaattttgaggtagaacaaaagtagaaaaaaaggttatcataactttgtttaaagtaattcccgcagagtaaataaagagaatcgataaattttaatcttttgattataagcactttctgtgtcttgttagttctgcaaagactttggtggtttcctttatcggaatggctacacaagaagtggctataagacagactgttaatatcactttgaaatctgatacagagatgcttgacgatgtggtagttgtagcttatggtactgcgaaaaagtcgtcttttacaggttctgcgactgctgttagtggagaaaaaatagcaaaaatgcaggtttcttcagtttctaaagccttggaaggtgcagcagcaggtgtacaagtaatcaacaccagtgggcagcctggagaaaatgctaaaataagaatccgtggtattggctcttttagtgcatcgtcggctcctttatacgtagttgatggtatgccttatgatgaagagtctgttaatgcattgaatcctgccgacattgaaagcatgtctatattaaaagatgctgcatctgcatctctttatggttcacgtgcggcaaatggtgttgtgatgatcactaccaaaaaaggtatggtagataaatccaaagtaactcttgatgcacgctggggagtaaatactcgtggtgttccagaatatgatatcatgaaagatcaaagagaatacgtactaacagcttggaatactttgaaaaatcaatctacaggtgcagaagcttccgaaggattaataggtagcattgggtacaatccattcatcggtgtagctaataatgccatggtttcagcagatggtgtagttagttctgcggctctccgccataatgacgattgggctgatgccgcattacataatggtatgcgtcaggaatataatttgagtctgcaaggtggtaacgctaagacaactcattttttatcattgggatatttgaaagatgaaggaattttaaggcatactgacttcgaacgtatttcagcacgtgccaatattaatcatactgtaaataagtttattgacatcaatggtaatttggcttacgcaagagcggaaaaaaatgcaggccagtcacaaaatgctagtttgtctaattactctaatgcctttatgttcactcagcaaatcgctcctatttatcctgtatatgcgtatgacgaaaacggaaatcgcatatatgacgaagaaggcaacactgtttatgattttggtgatggtacatatagtacacgtatgggcggtttcagtaatcaaaatgttgcagctaactctgggttggatgtgcatcagactttgaatgacaattttaatggccgtggtactatcaacattaatattattgatggtttaaaagcgactgctaacattggttatgatttaatgaatcaaatccgtacagaccatatgaatcagttatatggggatgctgctaatgtgaatggtcgtacttataaatataatcaacgtattgaatcgtttacagcaaatcaacttttaacttatagtaaagcatttggccatcataatattgacataatggctggtcacgaatcttattcatatacactgaaatatcagtatactcataaatacaatttttatactattggaaatcctgagttcaacaatgccataactatgagtgatatgaattcatatacacaagaacatagtatggaaagtttctttggtcgtgtaaactatgattttgataacaagtattatctatctgcaagtattcgttcagatgaatcttccaaattccatcctgatcaccggcgtggtactttttggtctgtcggaggttcttggagattaacacaggaagagtttttgaaagatgtggaatggttgtctaatcttaaactaaaagcaagttatggaacacaaggtaatgatggaattcttgatataaatggttatgtagtctatcaaccatatttgaagcaatattctgtaaccaataataacggagatttctctgtagtcgaaacttatcgtggaaataaagatttgacttgggaaaaaagcaaaaatttaaatatcggtttggaagctgcttttcttaataaccgtttgaaactagaaactgaatatttcttgaagaagacttcggatatgttgtacaatatgccttatcccatttcttctggaatttcttacgttccaatgaacctgttggatatgcagaacaaggggattgaatttaccatttctgccaccccaattcaaacaaaagattttatatggaatttatcttttaacggtacacactatagcaataagattttgaatcttccagaagacaaaagagagaatggaattattcatggtaccgcttctttgttccgcttaatggaaggagggtctatttatgatctttatacgtatgaatatgcaggtgttaatccagagacaggagcggcacaatggtatatggatgagaaagatgctaatggcaaggtgaccggaaggaccgtaactgaagactatactcaggcaagcaaatatgaattaggttctactttgcccgatttccaaggaggtttttcaactgattttgcatacaaaggaatcgatctttctatagctacaaactttcaaattggtggaaagatatatgacagcatgtattcttctttcatgcatgcgggaagcaatattggcagcaactggcataaggatatcttgaatgcttggactccggaaaacaaaaatacaaatgtgcctataatggatggtgcgcaaaatagtaatagccaatcctcacgtttcttgataaatgcatcattctttaacatccgtaacatttcattaggatatactttcccgaaagaatggatgaaagcaatatcagcaagcagtgcacgtatttacgtatctgccgataatgtagctttattctctaaacgtaaaggtatggacccccgccaatatgcttatggatattcggctgccaattattctgcgattcgtactttatcattcggcattaatttgaacttttaaaagaatagaattatgaaatatacaaaatatttagcaatattggctgcagcgtttatgatgggatcttgtagcgatgactttttggacaaggaaccttcagaaaatgcatcagaggaccaaattaaagatttgcttgataaagatcctacagctattcaagcatacattacaggatattacaaaaatatgttttctccggaagcacagcaaagtcatgatgatttcgggttaaaggcatttgaattggccacagacttgatgggagatgatatggcgtatatgacttcacacttcttcgtatatgattatctgcttgacaaccgtgcttcaagttatcgtcgtactaccacttactggcaagaattatatgctgtaatcagtggtgcaaatgaagtaatcagcggtctgaaagaacaagcggacagcggtgatgagagtgttgagaagatgctgggacaaagttacactatacgtgcttactgctatttttggttaataaacatgtaccaacaaccttatgaatggaataaagataaattaggtattcctatttatactgaatctgaaaccaaattgaatcgtgttcctgtaggtgaggtctatgaacagatattaagtgatatagataaaggatataattatttgaaaggaaaaggaatatccaagaaagatgaattaaatgaatatgcagcagctgctatttatgcaaacattctttcatttgttaatgattatcccgatcaatggaatgaagttgctaaatacgcaaaattggctattgaaggtggctcactgatgagtgaaaaagaattactttccggctttaatgacctttctttgagcgaagtgttgtggggggctgatattaatggtgaaacgaatacattctacgcttcattcatgagtcaagttgatccttacggtccgggatatggtggtaatttaggaaattacaaaatgatttccagtgatttgtatgaaaaaatttcagataatgacattcgtaaaaaatggtttggagttgatttgggagaagcaaatactcattataaagtaagacaatatgtgcagcgcaaatttattgatgtaggttctaccgcgcctggttttactcctacaggtgatactttttgctctgactatatttatttgcgtactggtgaaatgtattttgtagctgcagaagcattatatagggcagggaaagaaagtgaagccaaaacaatgctgactacgattatgaaaactcgtaatccaaaatatgaaacatccgcaacaagtgatgcacttttacaagaaattgaacttcaaaagcgtattgaaatgtggggtgaaggtcgtcgtttatttgatatgaaacgtcgtaatgaaagtttggataggacacatgcaattaatcatagtgcgattgctccaaaggaagtccctgcaggtagtaaattattcatttatcaaatccccgataaagagttaaatgccaatagtgagattactgataaaaacgaataactaataataagtctataataaaaaagatgcctagtaatctaggcatcttttttatgcttaaggtagaataaaagtagacataaaatcaaattatttttttctttttataatatatagttgatttatagtttgttataatagacgtaatattgtatatctgtaagaaaacagaatgctaaaactttgattactagatgcttttttgtatattttagttctgcaaagactttggtagtttcctttatcggaatggctacacaagaagtggcagtcaaagcaaacttgaatattgtattaaagtctgatacagaacagcttgaagaggtaatggtggtggcttatggtacggcgaaaaaatctgcatttacaggttcggctgccactataaaaaatgaaaaaatagcgacgagacaaacttcaaatgtgacaaatgctttggcaggtcaagtagccggagtgcaaactacgagtaataatggtcagccgggcaaagatgctgaggtgcgtattcgtggtattggatctatatcggctagtaacaaacctttgtatgtggtagacggagttccgtatgatggtgaaatttctgctatcagcacttctgatatagaatcgatgacagtgttgaaagatgctgcttctaacgctctgtatggtgcacgtggtgccaatggtgtaattttgattactaccaagcgtggtaagagtggggaagcccgtgttacttttgatgctaaatggggtataaataaacgtggagtacctaattatgaaacaattacggatccggctacattctatgaattaaactattcttctatctataatgctgatttgaaaggatatgcggcagccggagacttggttaaagctaatgcgtacgctaatcaagcgatgctttcttctacatatttgggatatcaggtgtattccattcctcaaggacagcaactgatcggtatggatggcaaattgaatcctagtgcgacattaggttattctgatggtacatattattatattccggataattggtcggatgaaatttttgaaaataatctgcgccaagagtataatttaagtattagcggtgcgaccgaaaaaatgaattattatatgtcggccagctatttggatgataagggaattgttcctaactctggttttcaacgttattctgcacgtttgaaagctgactatcaagtgaagccttggttgaaaatgggaggaaatgtatcatttactcattatgatagccgtgaacaggatactgagggtggtacctcaaatgcaaatatcttttatgcgtcaaatattatgggagctatttatcctatgtatgttcgtgatgcacagggcaatattatggtagataatcgaggtttccttcgttatgattatggaaagcaaggacaagattcgaatggtagccgtaatactattcctaatgcaaatccgttggcaagttatatgttggataaaatgaaatattctggtgatgtggttagtggaaaatggtctgctgatattgatatatggaatggaatcaaggcaaaagtgaatataggtgttgatgtaaataatgtgcgttctacaaatatggttaaccccttctacggacagtattccgaaactagcggagtcggaggtttgatcagtgtagctactgagcgtacatttagtgtaaatcagcagtatttgttgacatacaacaaaacatttaatgatgttcataatgtggatattttggccggacatgaaagttatgactataaatatcaatatttgtacggacaacgtgagaaattgtacgatccgaatgttcctgaattaggcaatggtattatgaaccagagcaataattcatattctcgtaattatgcaacagaaggatggttgttccgtgcgcaatatgactatgatgggcggtattttgtttcagcttctttccgtcgtgatgcttcttcttgctttcacccggataatcgttggggtaacttctggtctgtaggagcaggatggttattgagcaaagagagattcttggaaaaccagtcttggattgatatgttgaaatttaaaattagctatggtttgcaaggtaatgataacttgatgttccaaggtggtttgtaccgtaactactatccgtatcaagaccagtatacattggcaaacagtaatggtgatttttcaacttctttatattataaaggtaataaggatattacttgggaaacttcacatagctttaatactggatttgattttgctttttggggtggtaagttaggtggttctgttgagtacttctcacgtaaaacaactgatatgctttatttcaaaccggtagcagcttcaatgggttattcccgctatcccgagaatgtgggttcaatggtaaaccgtggggttgaattggatttgtattccaatataattgaaaacaagaacttttcctggaatataaactttaatcttacacattttaagaataaagtcttggaattatctcctgaactgaatggacaattgattgatggtggtcggatttatcgtgaagacgagtctatgtaccagctttatttacctaaatatgtaggtgtggattctgagacaggagagagtctgtgggcgctggtgactccggatgagaatggtaatacagttacaaaatcttattctgtcgcttctgaaaacagattcgcatcaggtgatattctacctaaagtttatggtggttttggaacaagtgtcacagcctatggctttgatctctctgtttcgtttgcatatcagcttggtggacgtattttggactatacttaccaaggattaatggacgtagcagctacaggtagtgctttgcataaagatatgttaaaagcatggactcctgaaaataaaaatacggatgttcctcgtatgaatattaatgaccaatatacgaacagattaacagatcgtttcttgactagttcggactatttaagtttgcagaatattacattgggttatactctgccaaaaagtctgacacgtaaaatgcagattgacggtgttcgtgttttctttgttgcagataatgtggctttgctgacagctcgcaaagggctggatccacgtcaaggttatgtggctgctgacaatgtgtattcacctatccgcacaatttccggaggtatatctttaaatttctaatttagcaacctatttttaagaatatgaaattgtcaaataaatatatagcatttgcaagtgtcgctttattaatggcatcttgcgatttggataaattccctgaaggagattacatatctgaagaacagaaagaagatataatcaatggcagacctaatttgataactgctgaagtgaatgctatggcagccaaattaaatacttttggtacgatttcagatgatgccactacttatcataatgattatggtattcctgcggtatctatgatattggaatcaggagggcaggacttggttgcattggttaatggatataattggtttaatacatctcagaattatagtgacagagtatacgatagttcaagcgatgaattgatttggaaaacgttctataatcacttgaaagctgcaaacaatgtactgaaattgatagcggcagatacggaagattcttctttgaaggtttatcgtgggcaagctttagctgctcgtgcttatgactatctgaacttggttcaaatctatcagtttacttatgcaggtcatgaaaatagtctggcagtacctattgttacagaaacaatgactgatgaagatatgcagaataatccgcgtgcaactgtacagcaggtgtatgaccaaattatgagtgacctgaatacggctgctgatttattggccgggtatgataatggctcaaacaaagatcagattgatgagacggtagtttacggattgcgtgctcgtgctaatctgttaatgcaaaaatgggcggatgcagctaaagatgcagaacgtgccatcgctggcggtacacctcagactttagctcaggtgtctactcctacctttaattcggcatcggcaagttcatggttatggggagtgatgattacgcctgataatgatgttgtccagactggtattatcaactggccttcgcacttgtgttcttttaccggaaacggttatacttcaggagtgcccgatggatatagaaaggtgaactctgcattatatgatttaatacccgaaacagatattcgtaaacaatggtttttgtctccggataataaatcttcattgattgataatgaacagattgagggtacttccatcgttgaatattttggtttgactccgtatgtaaatacaaagttcggagcttatcaaagtatatttggtaacacaaccaatgcatcagactggcctttgatgcgtgttgaagaaatgtatctgataaatgctgaggcagaagccatgggtggtaatttgagtggcggaaagagtacattggaaaattttgtacgaacatatcgggatccttcctttacaagtaaagctaattcggcacaggattttcaggatgaggtttggttgcagcgtcgtatggagctttggggagaaggtttctcactgttcgatatcctgcgcttgaaaaagccggtgattcgtaagaatacgaattatgacccgtctgtacaatataattcagctgcagaagcacaaatcctgatctaccggattccgcaatgtgaaatggaaaccaattccggaatcagtgatactgataacaatccggcggctccacaaccacaactatagggaataactgtaataaaaaagaggatgacgttcaacgttcatcctctttttttgttatatttgtcgcgaacttatttagattgatagataaatgaaagaatttgtaatttctgaagcacaggttgaaactgccattttagttggtttgattactcagacacaagatgagcgtaagaccaaggagtatttggatgagttggagttcttggccgaaacggctggggcaacagtggtgaaaaggtttactcagaaactgcctgctgccaattccgtgacttatgtcggtaaaggaaagctggaagaaatcaaggaatatattcatcaggaagaggaaaatgagcgtgaagtcggaatggtgatttttgatgatgaactttctgctaaacagatacgtaatatagaagctgaactgaaagtgaagatcttggatcgtacttcgctgattctggatatttttgccatgcgggctcaaacagcaaatgctaaaacacaagtggagttggcccaatacaagtatatgttgcctcgtctgcaacgtttatggactcacttggaacgtcagggaggtggatctggtgccggtggaggtaaaggctctgtgggattacgtggtccgggtgaaactcagttggaaatggaccgtcgtattattttgaatcgtatgtcattgttgaaagagcggttggctgaaattgataaacagaagtccactcaacgtaaaaaccgcggacgtatgatacgtgtagctttggtagggtatactaatgtaggaaaatctactttaatgaatttgctttcaaaaagcgaggtctttgctgaaaataaactttttgcaacattggacaccacagtacgcaaagtgattattgagaatctgccatttctgcttacagataccgtaggatttatccgtaaattaccaacggatttggttgattcctttaaatcaactttggacgaagtacgtgaagcggatctgctgattcatgtggtggatatttctcatccggattttgaggaacaaatttctgtggttgataaaacgattgctgatttggaggcaggtggaaagcctaccatgattgtttttaacaaggtagatgcttatacctatgtagagaaagcagaggatgatttgactcctaaaaccaggaaaaatattacattggaagaactgatgaagacatggatggcgaaattgaatgataattgtatcttcatttctgctagagagaaaataaatatggatgaattgaagactattatatataataaggtacgcgagctacacgtacagaagtatccttataacgattttctttatcaaacctatgatgaagaataaatacatatagaaaatgaaaacttatcgttcacttacacaagaagaaatacaacaattaaaagagagatcatgcactgcggttgattgggctgaaattgaagtagtagagaactttaagacggactatatttgtcatacccgtttttctggaagggtcagattgggagtttttgaagacgagtttatgttggcgggtggcatgcgtaaacattccggattgtatcatgcgactttgcataatgtaacggtgggcgataattgttgtattgagaatataaaaaactatatagccaactatataattggggattatgcatttatagagaatgtagatattattctggtagatggctggagcaagtttggaaatggcgttgaagtagctgtattgaatgaaacgggtggacgtgaagtgcctattcatgatcgtctgtcagcgcatcaggcctatattttggcattgtatcgtcatcgtcctgaattgatttgtcggatgaaagccattattgaccagtatgctgaagagaatgcttcggatacaggtactattggccagcatgttactattgttgatgcgggatatataaagaatgtacgaataggtgattattgtaagatagaaggggcgggacgattgaaaaacggcagcttgaacagtaatgagcaggcgcctattcatatcggctatggagtggtatgcgatgattttattatatcaagcggttctaatgtggaagatggaactatgttgacccgttgctttatcagccaggcatgtcatttgggacataactattctgcatctgattctttgttttttagtaattgtcaagaagagaacggtgaggcatgtgccatttttgccggaccctttacggtgactcatcataagtctactttgctgattgccggaatgttctcttttatgaatgcgggttccggctctaatcaaagcaaccatatgtataagttaggtccgattcatcagggagctatggagcgtggggcgaagactacttctgattcttatattttatggcccgcacgtgtaggtgcattttctttggttatggggcgtcatgtaaatcatgccgatacttctaatctgcctttttcttatctgatagagcagcaaaataccacttatttggtgccgggggtaaatttgcggagtgtaggtacgattcgagatgctcaaaagtggcctaaacgtgacaaacgtaaagatccgaaccgtttggatcaaattaattataacctgttgagtccttatactattcagaaaatgatgaaagggcgtagtattctgaaggaattacgtaaagtatccggagaaacctcagaaacttactcttaccaaagtgcgaaaattaagaattcttctttaaataatggcattcgtttttatgaaacggctattcataaatttttgggtaattcattaatcaagcgtttggaagaagttcgttttaacagtgatgaggaaatccgtgcccggttgattcctgatacagagatagggacaggagaatgggtggatatttccggattgatcgctcctaaaagtgagatagagaagttgatggcagatatagaatctggaattctgactaatgtggatcagattcatgaccgttttgttgagatgcatcgtaattattatacatacgagtggacatgggcgtacgagaagatgcttgagttttataatctgcgttccgatgaaataacggcaaaggatgttattgctatcgtgaagaagtggcaggaggctgttgtcggattggataaaatggtctatgccgatgcgaaaaaggaattttctttgtctgctatgacggggttcggtgcagatggatcacgtgaagaaatggagcaggattttgaacaagtgcgtggggtatttgaaagtaatccgtttgtgacagcggtgttgcagcatattgaagcgaaaacagcgttaggtaacgagttgatagaacggattgcttctatatgatatttttgatgagagtattcaaactaagatgaacattcggaaaagttacagatggtagttatatataaaagagccgtatgaacgctggagtagttatacggctcttgctattggatgacatttgagcttggacactcccttttttatttttttaccacaggtagtataactctgcttgcagctccttgctgatgataaattttgattttttgtttcatcacaaaatcttctaccgtacaatgataggtatcaataaatttttgtggattgcggtcaataatggggaaccaagagctttgaatttgaatcatcagtctgtgtcccggtaggaatgtgtgtgccacatcatacagtgtgtaattaaccggagttatttcttccggtttgaaaggcaggggattgtcgaatcccttacggaagcgtcctctgaacaattcgccacgaatcatcagctggtacccactcattggatagtcactctttaaataattgcgtgcagttttggaatattcaaatttttcaggatatacatcaattactttcaccataaaatcagcgtcagtactactaatggcagtcattaattccacttctatagggccggccagtgtcaatgtatcacatagcggctccgtcatgaaagtaatgacatcgggacgtgaagtggcaaagcgttggtcatctaccatgaattcttttgtccggtaagtggtagggtttgccgtatagggtaccggacgtgacatatctgaaatatattctgaataagactcttgttctgccggtgcttgtgtggatactgatccgtttttatgtatataataaggtatgccagtagttttttgtacaggccattcgtcgtatgttttccattcgttttcacctgtatggaatatatttactttatgtttgggcttttctccctttccttccaggaaatatcggaaaaaaggatattctatattgtccatgtaataagccgaagtgcttttgccgaaatacagattaccgaaaccttggaacccgcgtactgtccaggctccatgccaccaaggaccgaatgtcagatataaatctgtatccggtgattgctctttgatggctttataaagattccaagctccgtaacagtcttcggagtcatacagtccacctaccaccaatatggcgggcttcaagttataacaggaggtacgtgcgtcgcgctctttccagaaatcatcgaaatcagggtggtttttgatatcattccacaatgtctgtgtggtatcacgtaccaagtcgtccacgttcttaaaggtaccgagtgtcagaaaatctgtgtaaacatcattctttacaatttggttcatcactcctttccctatgtggcgtccttccagtctgggaaggaaattagtggtttgcagcagggtgaaggctccgttgtgatgacggtcatctccacggaaccagtcggtgacgggagcttgcggagaaacagctttcaaagccggatgattggaggaagctgtcatagtggcatagaaaccatcataactgattccccatgttcctacatttccgttattatatgtgttgtgaatcaaccattctatggtatcgtatgtgtccgtagcttcgtctatattctttttatctttcttaccctttttgtttttgttgagagggcgtacttggataaatatcccttcactcttatgccgtccacgtacatcttggaagacgataatatatcggtgctctatatagtttttcagattagtcctgaaatgacggtcaaatccttctccgtatggggaacaagagtaagggctgcggtgcatcaggataggatgctgcctgctgttgtctttcggttcgtagacagcggtgtaaagcttgattccgtcacgcatgggaatcatgacttcccgtttcgtgtagatttccttcagtttgagttcgatactgtccggttggttttttgcttgggtttgtgtccatcctcgagggatgagaaagcataacagtaatgaagtaataaataataatttgcctaattttttcatgtataatgcgatgttattttaatgagttggcaaaggtaaggacattccttgaaagttttcacgctaattaaggaaaaatttcgataatagttactacctttgtcacactaataacttttaactaaaaataagtatcaatatggcaacacctccgttccactatcagcacatgttcccgttgggacctgataaaaccgagtattatttgctgactaaagattatgtgtcagtaagtgagtttgaaggaaaacctatcttgaaaattgaaaaagaaggtctgactgctatggctaacgctgctttccgtgatgtttcttttttgcttcgccgttcacacaatgaacaggttgctaagattctgagtgatcccgaagccagtgataacgataaatatgtagcattgactttcttgcgtaatgcagaagtttcagctaaaggtaaattacctctttgtcaagatacgggtactgctattatccatggtgagaaaggtcagcaggtatggaccggctattgtgatgaagaagccctttccttgggagtttataagacttatacggaagaaaatcttcgttattctcagaatgctcctttgactatgtacgatgaggtgaacaccaaatgcaacctgcctgcacaaattgatttggaagctactgagggtatggaatacaagttcctttgtgtgactaaagggggtggttcggcgaacaaaacctatttatatcaggaaacgaaagctgtattgaatccggctacattggttcctttcctcgttgagaaaatgaagactttgggtacggccgcttgtcccccttatcatattgcatttgtaatcggtggtacatcagcagagaagaacttgctgactgttaagttagcttccactcactattacgacgagctgcctactaccggtaatgaatacgggcgtgctttccgcgatgtggaactggaaaaacaagtattggaagaagcttataagattggtttgggtgcacagttcggcggtaagtatatggctcacgatgtccgcatcatccgcttgccccgtcacggtgcttcttgtcctatcggtctgggtgtttcctgttctgctgaccgtaatataaaatgtaagatcaataaagacggtatctggattgaaaagatggatgataaaccgggtgaactgattccggcagcacttcgtgaagcaggtgaaggagatgtggttaagattgacctgaaccaacctatggcggatattctgaaagaattgaccaaatatccggtagctacccgtctgtcattgaacggaactattattgtaggtcgcgatattgctcatgctaaattgaaagaacgtttggatcgtggcgaagatttgccgcagtatatcaaagatcatcctatctattacgccggtccggcaaaaactccggaaggtatggcttgtggttctatggggcccactacggcaggacgtatggatccgtatgtggatttgttccagtcacatggtggtagcatgataatgttggcaaaaggtaatcgtagccagcaggtaacggatgcttgtaagaagtatggcggtttctatctgggctctattggtggtccggctgctatccttgctcagaataatatcaagagcattgagtgtgtggaatatccggaattgggtatggaagctatttggaaaatagaagtggaagattttccggcattcattttagtggacgataaaggtaatgacttcttcaagcagttgaagccgcgttgccttggaaattgtaaataattaattatttcgtaataatactaatacagccttcctccctttaaaggagagggggctgttctgttttttatttaattggtgttatccgttaccttaataatatgatgaaaaaactacgattgttgtttgtgctgttatgggtgacaagcaacttattttcttctcctgttacaggattattagagcgcatcgacaaaggagcttcctccaaatttattatcgaacgtcagaaatcggggaccgatttttttgaactcgatcagaaaggtgataaagtaattatccggggtaatgattatgtaaatattgctaccggattgaattggtatttgaaatattatgcaggcatacatctttcttggaatggaatgactgcaaaactgcctgctgttttgccccctgtgactaaaaaggaacggcatgaaacggatctgccctatcgttatgatctgaattattgtactttctcttactccatggctttttgggactgggagcgttgggaaaaggagatagattggatggcgcttcatggtatcaatctttccctggcattgacagggactgagtcggtttggagaaatgtacttctaaaactaggatatactaaggatgaaattaatgagtttgtagccggaccgggttttacagcttggtggttgatgaataatctggaagggtggggaggacctaatcctgaaagctggtacatccgccaggagaaacttcagaagaagatcgtaaaaagaatgcgtgaatatggcatcgaacctgtgttgccgggatattgcggcatggttccccataatgcaaaggagaaattaggattgaatgttgctgatcccggattttggtgcagctatcatcgtcctgcctttttacagccggaggatgaacgctttgaagaaatctctgctttgtattataaagaactgacaaaactgtatggaaaaactggtttttacgctattgatccgtttcatgaagggggaagtactcaaggagtaaatttggatgcagccggtaaagccatcatgaaagccatgaaaaaaacaaatccggatgctgtgtgggtggctcaggcatggcaagacaaccctcgtacttcgatgatagaacatttggaagcaggagatttattagtcttggatttgcacagcgaatgccgtccgcaatggggggatccggcatcagaatggtgtcgcaaagggggatatggacaacatgggtgggtgtattgtatgcttttgaattttggtggtaatataggattgcatggtaaaatggacgcgctaattaatggtttttatgatgcgaaaacagataaccatgccggaaagacgttgtgtggagtagggatgactccggaaagtattgagaacaacccggttatgtatgagctggtgatggagttgccatggcgtgagcatcggtttactcgtgatgagtggttgaaaggatatgtatatgctcgttatggggtagaggatgaggctttgcaacaagcttgggatttactaggtaacggtatttataatagtcccaaggagaagatacaacagggaacgcatgagtctgtattctgtgctcgtccggggttggatgtatatcaggtatccagttggtcggagatgaaagaatactataatccgcaggatgtgatagaggctgcccgactgatggtttctgtggctgataaatatcagggtaataataattttgagttcgatttggtggatgtgctacggcaggcattggcagaaaaggggcgtttgatgcaaaaagtggtaacggctgcgttccgggcaggagacaagcaagtatttgagttggcttcacagcattttctgcatcttattctattgcaagaccacttgctgggtacccggaaagaattcaaggttggaacttggattgaagcggcacgttcagcaggacagacccaggaagaaaaagcattatacgaatggaatgcacgtgttcagattactacatggggaaatcgtgtagcggcagatcaaggcggacttcgtgattatgctcataaagaatggaatggcattttgaaagatttttattttatgagatggaaggcttattttgattatttagcttgtgtcctggatggaaagcaaccggaggaacttgatttttataccttggaagaagcatggactaaagaaacaggattctattcctcaattcctgaaggaaatactgtggtagtagctaaaaacatttttgaagaagttttttaaatgttctttctactatggataacttaagactttcataggttataaggcttgattatgggttcagaactgatgggtatgaaattatgataactttattcacggtagggggtgattgaatttaccccttacagtgaatgaaagttatggaagcagatagcgtgtagaaaacgcttacttcttcttttcggatgtctgtttccagatacgtaccatatagaatgcacaatgtgtgaacgcaaagacgaacgaaatagcgagcaatgtcttgtcttcctcccagcctacagtctgttgatgccataatcctgtaataactgaaagtacagacagggcgattcctgccatattcaatatggtgagtcctttgcgtcgttttacattatgctctagcttgctatgttttactccgtagcaggcataaacatccagacctatcagcatccataataccaatcggatccaagtatcagccggaagaaacaacatcatacaaaggcaggtaaggatgcctagaatcggtaccgtgggaacaaaaggagttttaaaggcacgatgtacgtcaggcatacttttgcgcacgatcaatactgccgcgcaaaccaatgtgaaggcgaataaggtacctatactggtcatttctccggctacacgtgccggaacaaatgctgccagccctcctacaatggccatgaataacaaattactgtgtgccggtgtccggtatttctcgtgaatctttgaaaagaaaggaggcaacagtccgtcgcggctcatacttagaaatacacggctttgtcctagcaaagttaccataataaccgagcagtaaccaaacaggatagccagtacgatggcccggttcaaccacggataatccggatgaattactcctgtggcatctgcatgtcccatgtggtcaatcgctacggcaacaggtgcgataccttgttgtcctgcaaagtcagaataatgggcaactcccgtcattacgtaagcaaataccatataaagaatggtgcaaatcagcagggaacctagaatgccgacgggcatatcccgcttcggattttttgtttcctgagcggctgtacttacggcgtcaaaaccaagaaaggcgaaaaatacaatcgctgctccacgcaatacgcccgagaatccgaactcgcctaaagtacctgtattggcagggatataaggaacataattctctgcattaatgtatttccatcctaatacaacgaaaataagaatcactgccaccttcaggaatacaatgaagccgttaaaaatagaacttccttctgttccacgaatcagaaaaatactcatcagcactacaatcagtgcggccggtatattcacaatacctccgtcccagggacaagcagcaaatgcatggggtatattgatccccactccttccaaaaaaacaacgagatatctgctccaactgatactgacggtagtagcggcaacagtatattccaatactagatcccagccgataatccatgctataagttcgcccattgtagcatatgagtatgtataagcactacctgctacaggtatcatggaagcaaattcagcatagcataaaccggcaaaacaacaaccgattgccgctatggcaaaagataaagtaatggcaggacctgtgtatcctgcggccactgttccggtgatggaaaataatccggcaccgatgataacacctactcctaatgcgattaaactccatggtcccaagactcttttcagggtcttgtttccagactcataggcttcggcttgtaatgcagcaaaaggtttcttgataaataatcccatatctttttacaacgtacttagtgataattgtgtgcaaaggtacggataactgctatgaattacaagctataagtaaaggctataacgattattcaagatatttcgttattcttccacttagttggagcagggaaatttcacagactttggtgttatattcagcagataaaatacgttcttccgcatcaagcagactcttttgggcttcacgcatctcgataccggagagatctcccagcagataacgttctttggctatttcatggttttcacgggcggcaaccagattttggcgttccaaatttaataaacgtaaattattgcgataggcttgccacagattgcttaaatctgctttcaaacccaattccagttgttctctttccagttgcgagttacgtatttgcaggctggcattgcgcttttcacggcgacggttaccatcccataggttaatgcctacggtaattcctccgtttagtccccaattgcttctccggctggtggcgtttgtttcatatttgttgaatgtatagccataaccggcgttcaatttcacatagggataattacgggatagaacctgacggtaatccaattgggcaattgttgtattttgatcagctttcagcaggttggcattcgtcttaagggtggattcccataattcatcataattcagcgcgtcattcactgttatgatagagtcattgacacgtagcggccggttgacttcctgtacagccattaactcgttcaggttgatacgtgaggtaaccaccagttcttgttgtttcatatattgtgcactgtctgcattgaagtccactttggcttgttgataatccagccgggaaaaattaccgatatggtatcgttcttctacaatgcgcaggcgttctttggataaagacacagcgtaaaggaagttcttcagacggatttcctgttgtacataattatagtattcggcagtgagtcccgctatgaaatcttcaagggtgatacgcgtgttggtttctccctggtgttccaattccttaagttttttgtaggtggtgctgatattgaatccgtcgaacagagtccagtttacatccagcccggcctttaaggtttggtcgtagatgtttcgttcactggctgtagtgcctgtacttctgcttttggtatccgtattgtccaacgttcctgtatatccggcagacaaatcaacagttggcagataaccggcatttgctaatgtggcattgttatggctgatttgttcttcattacgggtgatacgtatggaataattgtttgcaagcccttcctccagacattttttcagcgtataaggatattgcgcataggtggaagccacccatgcggtgcagatacataaagttataatgattcgtttcatacaatttctgttttaacgtttcggttggtagatatataactataaatagccggtacgatatacatggtcaggaaagtagatactaacattcctcccacaacagccgtacccatggcgatacgttgattggcgccttctcctgttgcgaatgccagtggaatcaaacctaatacggtagaggcacttgtcatgagaatagggcgcaagcgttgcaaagcggcatcccggatggcctgcatcttgttttctccgccctcctgcttctgattggcgaattccacaatcaaaataccattctttgccactagacctatcaacatgataatgccgatttggctgaatatgttcatcgtgatacctccggcatacatgaaaatcagtgctcctgcaatggctagcggaacggtaagcatgataatgaaaggatccttgaaactttcgaactgtgctgccagaataagatagataagtatcaatgccagaatgaaagcaaacatcaggctggatgaactttcccgatagtctttggagtctcccgacaaggcggtacggaaggtttcgtccaaagtctgggcggcgattttatccatttcttccaaaccttgtccgatggtctttccatctgctagtccggcagatacggtagcggaaataaaacggttgtagtggtataatttaggaggagctacggattctacaaattctaccagattgtccaattgaatcatttcccctttgtcgcttcgtatgtaaatagatttgatattggccggtgtattacgttgttggcggtttatctggcccaaaatctcatattgttttccattcatataaaaatagcccatacgttgtccgctgagaccgtattgcagtgtttcggctatatcacgcacagtggctcccattgtgcctgccttatcacggttaatattcactctcatttccgggctgctgaacttcaggtccacgtccgccatctggaaagtagggttatcatatactttgcttaaaaaatccggtaatactttctccagtttttctatactgacagcttgtagtacatattgtacgggcatacttcctctccgcccgccgaaagaagactgttgttgcacaaaggcacgtgctttcgttttattgcggatggcctgtgaaatacgttcggcaacttccatctgggtataatcacgatctttgatatctttcaatgtgatacgtatatttccactgccactggaaacgcgtgcggttactgattctgcatcgggtataatagaatctaccagattgttgatatcttccgtataatcacggatgtattcatagctggctccttcagctgcacgtgtattgatacttatttgcgaacggtcctccataggagccatttcagcgggtatttggccccaaagtactccgatggctatcaacataatcactgtaacaggtattgcccatatgcgtcttttaagaaaagcattcagtgaacgggcatatatgcggttcataccttcaaagaaaggctctgtcttttggtagaaccatccctgtttttcccgtttaatcaataacttggttgccagcataggggtgaacgttaatgcggcaaaggaagaaatgatgaccgaacctgccacaacgaaactgaactcacggaataaacgtccgctggttccttccataaatacgatgggcaagaacactgccaccagggtgatagtggtggagataacagcgaagaaaatttcttttgccccttctattcctgcttcgaacggacgcatacctcgttctatgcggatatagatattctctgtcataacgatggcgtcatccactaccaaacctacagacaataccaccgccagcatggtcagcacattgatggagaaacctgctatgtacatcacaaagaaagctccgatcaatgaaaccggaataacgatgcagggaatcagtgtcacgcgccaatcgcgcaagaacaggaaaatgatgatgataaccagtacgaacgcttcatacaccgtactttttacttcatcaatagaagcgcggataaacttagtgttatcaaagccatagctgtatttcacatcgtcgggcaaatcctttttcatctgctccatacgttggtatacggcatcggcgatttcgatatggttggcaccgggttgtggaatgacaacgacacctaccatcggcactccgttcattttcatataactcttgatatctgccggacctagttcggcgtaaccgatatcgctgaaacggacaactcttccgcctacttcttttaatatgatgttattgaattctttagcggtgtgcatttgtcccatggtgcgtaaggtcaattctacggtattaccttcaatgctgcccgaggggagttctatattttcattggttatcgcgttctttacatctaccggagtaatgccataccctgccatcttggtggggtcgagccataagcgcatggagtaacgtttttctccccaaatagatacgctgcttacatccgaaatggtttgcagttgttcttttacggtcaagtctgctatttcactcagttccaacagagagcggctgtcactttggatagctaccatcaggataggcgttgcatcggcatcagccttggatacagtaggagggtcacagtcgcgtggcaggtaacgttgtgcgcgggacactttgtcacgtacgtcattggcggcagtttccaaatcgacggataattcaaattccactgtgatacggcattgtccttgttggctgacactggacaaagaacggattcccggaataccgttgatgttttgttccaaaggctcggttatctgattctcgattacatcggcattggcacccgagtaactacaggtaacagagatgatcggattatctaccgaaggatattcgcggactcccaatgtattgtaaccgatcagtccgaaaagtaatatgatgatggtaagcacggtggcaagcacaggcctacggatactaagttcggaaatattcataaaagtatttttttagttgttagttaatggcctgaagttccacaggcattcccttacgtaattgcagtgtacccgatgtcaggatggtatcacccacagacaatcctcgtacaatctgtacttcggcttcggtacggagtcctataataacatctacagggtctgcaactccgctacgataaacaaatactttatttttacccatttcggggacaatagcttcggatggaatcgctatcgcgtcttctatttctttttgttttaattgaatatctgcatatctgcctgccagcagttcgccgttgcggttggggtagatggcacggatgttcaatgaatgggtttccatatctatactggattcggttgcataaacctgtgcatgataggtatccagttttccttctactttgaactccagattagtccctttttttatttcccgggcataacgttccggtacagcgaactctactttcaatggggtcactttggtcagtttggctactacagtggtaggggaggcgtatgctcctgtactgacctgtctcaatccgatgataccgtcgaatggtgcgcggagttcggtcatgtcaatattggccttgatattttcgatatcggcgttaagggtggcaagttcggtttttacctgttcgtatgcttctttactgactgcatctcgttttaacagagcgttttgacggaacacacggtcttcggctaaaggtatttgtgcttccagacgttttaattgagcctgtaactgccggtcgtttactttggcaagtaattctcctcgttttaccaatgtgccttctgtgaaaaaaatatcggtgatctttccggaggtttcaaaagacaaactcacttcttcgtcaggaaccaggcgtccggtaaccaatatttcatctgtcagcaagtgtggttttatgacttgtgcattgactttcaatgtacgttgcttgttttctttaggtaacgcgtcggcggctgtcagttcttcattttcgtgaggggtaaattgatagatgcctagtccggccaagccggctccgattaatataatgatgccccatttgattcgtttgttcatgtgcctttctatatgggttaaataaatacgttaatgtaaggttagataaaaaaacgtggcgctcagtttaaacgccacgttcttttttaatattttttttcgtttgccagcttccacatcgcaaggaaagaggctttggttatatcgactatcttcagccaattaattttctgtgtttcatctcccggaaggtgataatcgggatgggcatcagtgtgataccatataataggtattcccagtttggcgaacgtgccgttgtcgctgcctcccaccggattgtcccaagcccggtagtcaggagatagctgcaagcggtaatcttcaatatcttttttcagccagtcaccgaaggcctgatgggctgcggtatagaagtaaacgaaataatcgggctggtcctcccggttgttacgtcctatcatgtcatagttcaaatagccttttaccttcttaatatccggatagttcatggcgaaataacgggatcccagcaatcccttttcctcaccatcccaaaaggcgaagataacggtacgttccggttgctcaccggtagcaagaaaggcacgggctacctgtaatacggcttgaacgcctgatgcattatcatctgcaccgttataaatctgatctccttccagcataggatcgtagcctatgtggtcgtaatgtgcgccgataatgacaatttcatttggattctttccttctattttacctaagatattacgtaatgccaatttttgatgtaccacttttttcagttccgcaatagaatcgggatgtacttgccagcgttttcctttcacttgccgttcagcatgatatacatcaaagggttgtatataatctccggctagcagtggttttattcccatctgtttcaggcaggaaatgatataattgcctgcaatgcgtccacctttccatccggcttcgcgtccttccagttcgtcacaggccagaaagccgatatgtgcttcggctgtggcacggttgatagtttctactccttttttttcaggagtcacttttttaggagaagcggcattcagcccggtggtgcataatgcaaacagtgcaatagctaagaggtgttttttcataaagttgtggtttttagtaagcggcgcgatacttgccttcttccttgtcttccaacatgttcaggtaagaagtatagcgtgactcgctgattagatgtttctccactgcatcgcgtacggcgcatccgggctcgtgcctgtgggtgcagtttccatacttgcattgagcggaatattcaaatatttctttaaagtaatgtcctacttcctcttcttccatatcaaatgttccgaaacctttgatacccggagtgtcgatgatgtatccaccaccgtctactgggaacatttcggaaaaggttgtggtatgcattcctttgttatggtaatcggaaatttcacctgttttcaaggtttgttcaggcaaaatagcattgattaatgttgatttccctactcctgagttgcctgaaagcaaagtgacctttcctttcaggtcttttttcacttcgtctgtacctatgttgttcagtgcggaaactttgaagcaagggtaaccgatgtatgtgtacaggtttatcagagcatccatatagcgtgtatcatcctcattatacctgtctatcttattgaatatcagtttgacgggtacacggtatgcttctgcagtggctagaaaacggtcaatgaatatagttgaggtttcgggataattaattgtaacaatcagcatacattgatccagattggccgccagtatgtgcgattgtttggaaaggttagaggcgcgccggatgatatagttcttgcggtcttctatctcactgatgaaggcggttccttcattgttgataatgatttgtacataatctcctacagcaatgggattggtactccgaataccttttaaacggaaatttcctttgatcttgcattcgatggtacgtccgtcttctgttttgacaagataccagctgcctgtgttttttattactagtcctttcataaattaaaatgaaggatgaaaaatgaagaaagagggattggaccgcacggacaagagcaaggctgtgcaggacaattcttccttcttcattattattgcttcattattttaagtttcttcattaaaccgtcataatttctttatctttctctgccagaagttcttcaatcttcgcgatatatttatcgtgtactttctgaagtttggcttccgcattcttttgctcgtcttcgggcataccttctttaacagcttttttcagtgtatctatagcgtcacggcgtgcgttgcgtatacttacttttgcggtttcgccttcgcctttacattgtttggccagttgcttgcggcgttcctctgtcaatggcggaatacccaaacggatgatttcaccgttgttttcgggagtgatgcccagatcagagtccatgatagctttttcgatgatacggaacatacttttgtcccatggcttgatggcgatactgcgtgcatcgggagtagtcacggcagctacattactgatgggaaccatgcttccataagagtcaacacgaatgccgtccagcaaccgggtactggcttttcctgcacgaatgtgcgctaaggcctcttccaaatacataacggccatgtccattttctcttgtgcgtcgttgatgcaagtttttgcgtctatcatactgttctgttatttaagttgtttattgattcgttttaagtgaaacaaaagtaatttattttttgattatctgcaataaaagggggatgattttatatttctaacggctctttactttatcatcaccagtttaagttgttgaggctttattaaaaataggtgaaaagtttttgtgtcctatcggataacaggattgaaatgatgaacaccttaagcctttcttccctgtgtactaagtcttttttattgcatgattaagctttttcatacggcaacctattacagactccgataatggactgtataaactattgtagtggactgtagggtctgctgtaatagactgtacggtccactgacggagtctgtagtaggttgccgtatgaaaggccttagctgtgcggaagaaagcccttagtctacggggagaatacttttgtaatcaggtataacgacgagacagacaaagacatcaacagaattaggataaatttggttggtaagcattatctttgcattaaaaaagatgataactttatatttagcccgtcacgggcagacagaagagaatatgacccgtattttccaaggacatatgccgggcacgctgactgttgaaggaatagcacaggctgaagcgctgcgtgatactttgcgggacatctctttggacgcagtggtcagtagtgatttgaagcggtgtgtggatacggcccgtatcgcggtggaaggtcggaacctgccttgggagaaaatggttttgttgcgtgaaatcgattgggggagctggacggggcttgccattaaagaagttgatttgcgacattttccggcagatgtggaaacggaggcgatgctgtatgagcgtgcggggcgttttgtggactacttgaaagagcgatatgatggaaaacaggtgttggctgtcggacatggactgataaacagggcggtacaggcacacattcaaggagtaactttggaacatttgcgtagtgtgccaaagatgaataatgcggaactacgccggttcaagttaacgtaattccgcattgaataacacgtggttattgcaaagtgattcccattattcctatcactacatcattggacagggtttccagggtcagcccttttagttccttggaatgatccaaaggaatatcgagcaatatgcctgcaccaccttctatctcacgtccatatacaccagtgatgttgagttctttacccaggtcacggcttactttaccgcttttcaagtgcagacggtacggccggggagcaggtacttggaacgctttgccgtccacatagaggtcttgttctatgggacaccagttgtccggattgatcaactccgttgcttgggaagttccgtctgcatagtgtatgcggattattccattggcaatgtggcattgcatgtggttggtacttcccgccatcagcagataagcatgtgaagctgtaccagatagtgagatggtggaactgtccgggtaattatcccatagggaggtgaaaagaatgttgttccctttttctttcagacggaaagggatgcctaaagacgtttggaaagtatcatgatgtacaaggctgcgtaatcccgagtcgtctatggtagcgctcagcagcggatgacaccattctcctattccttgtgtgggaagttgcaaagtagtgtatggagaccggggagacaggtattcattttgataaatatcggtgacagaagcattcagttgtctgtcaaaatcaatcatccggcatttttcgggacggatatctgcaaagtctgtataggaaggggctttctgggtgttctctatatagatattaacaggttgccaccaatccatttctccttgatgagtgtaaacaaagaaagtgtggtgtcccggttcaccttttagctgtgcgttgaaagcggtggcttccactgtgtgttttgctaaaacgctctgaggatcatatacttgggagatggatgctcccgaaggtatttgcaaagccaacttcccgtttgaagcgatgactagttcttggactgccaatgtatgaagtgatgctccttcccattcgatggtaatggtggttgaagatgttccttccgcctggattgaaagaagaggatagccatgggccgattcgatggattgccatgtggcaggaacaccattcacttttactgaacggatcttctcttttctggcattgatttgcaataccggatggagaggagtctggaaccgttgtgtgatatgataggtgtccgtatcttcttttcgggtaaagcgatagcttatatcgggagtactgacggaagccttgtcccagtcgtccggaaagcccggccggaggatgatttgctggttcagggcatccggcaggataccgaacagtccttggatcagtactcgtgaagcgaccccgatgggatcgccgaaatcccggtagcattctccgcgtgcggcatcatagaagctgatctggccgaagttgcccggactgtctcctagatacatgccgtctagaacagagcttttcaaaagtttgtatccggcctcggcacgtccggcctggaagtatgacaatgcggtatgcatgacttcggcaaaggcgatattattgacactccatgagtagggtagccagttggtggtggcgatagtggcatatccattctcttttaatccatgggctgtgacgggaatatgaggaatggctgtgtctatataacgggtagcctgataggcttggaacgggttagctgtctcgctgtctatagcatgataaatggtccatacagcggcactttcgtgtactcgcttgtgtcccataaaatcttgatattccgcccaatgtcctttaccgggaagccatagcctctcgttcatggttttcagaatcttttcggcttcgttgcggtaaggagtgggatcttcgcctatcttttcagccaattgggccgctgtcttgttggcacggtagttataagccgatgaatgggtgactcctccgctattgtaataaagggcgtcactggcccaaatgcaggcgtatgcgtcatacagcccgtcgttatctgggtcgtagttcagcttttcccatgcgaggtgacgggtgatgacaggccacatttggcggacataatccaagtcccccgtccatttgaaatgccataacaattcgtctatgtaacaaaggttcatgtcgtagtggtgcatctgattattgcgatgcggattacggcagatgtatccgttactgtattggggggtaccccatttcttgacggaacgtgccagatgcagggcggaatcttgtgccggatgggggagggtgttgggcacttcggtgacctgacttgccgcgtatgcgttgaaatgggtccgggcacggtcatgccatcccaaaacatcgccggtataagcggctcgccaaccactgagtggcatccgccatcctatggcaccgtgtaaccatacttcgccgtcccagattccatcagctgccatggccagagtgcctcctaaggtgttgaaataagggtcgggtgtttcaatgcggatgcgtgaggctgtttcggagcgggcagcttctgcttttttaaacagggtttcgccttcggcagttgtcagtgtacgtagttcctggttttccaatagaatataaagtgttccatctatctgtgccgggcaggattgtaactgttgaggctggagaggagcttcgaaactgtcggcagggtcggctcccatatctccgttacggtttagcttggaattacgtatctctgaaatggatgccagtagaatgggattggatcccttgaaattccgggcgttgaattgccagatggccccttctttatcgggaagtgccaatgtggcaatagataagtttccaccttcgaaggatgggtggaataaattgtagctgcggcgtcccgctgtataacgggactcgcagtgttcggtagaatcaagggctaccgttcctccggaggtctgcagtttaaagcagatgtgtttcgggttcttcttggtataagcagcgaatacgggccggtcgcttgtctccagccggaatgctgtgtggctgccgtataaggcacgggtaaagcgattcttaccgttgatgcagacaaaatcgtctccgtcaggggtatattgcaggcttcgggtggcattccggcgatgctcgttgtacgaagtggattctatgaaatcgcctatcttttgtggctgcttggtttgtcctgcgccggaaacgctaccgatgcccaacaggcatagaagtaaatatgtcgttttcatgatgataactactaactcctgttcttacggtaatggctgtaatccttcccagcgtacattccatttgccatctttcggaaatccgggattgttcccttccgatccatcccatccggcgcacatcatagcgactgtggtcagtaatccaccgttgccgggcaggtaaatacgcagacgcccgtcctggtaattgtgaccgtttaccagataggtgttggtacgtttgtccatcaataatgcgctgactgccttctcgggctcacccattcgggcggcattcatggctgtcatcggataatcccagccccaggtcttgtcccagttccagttatcccaaatccagtgcagggtgtttttcatatatccggcatgaatcagctgattcatgggcaggatgccgacagcgcccagcactgccatgtgatctgaggtaaaacggatatctttataggtatccaccgcggtctcggctgccagatacagctgttcgtcgttgtatgccagcggagataatttctctatcagtacatcccattcgggtacacgttccatccctgtacgttcacgccatgtttgggcaacttgcatggcgaaatgccagtacgaaagctcaaaaggcggattgacagtttcggcagcgcgcaacgtttcctgtgcggggatagcacctttcaagacataacggtcgtgctcttcctcgtatgtggcgaatgaatacatgaattcggcggtttcctgtatcaggctattgtatttttttagcagttcttccgatggattagcccgatagagcaattctgccaggtagatgagatgaggctgttgccagatcaggaagctgcctactttagagggggcttcaagaccgctgggatcagtcattttcatccatcgtatgcctttgaaaccttgtctttccgctatctggcgggctatgggttccacggtttcataccaggataaagtgcggtccaacaattcgggatgtccccataaggcgaattgtgcctgatgccaccagatcatttccaaatggaatttcccgaaccaggagttgtaagttagtccggtttcctgtggcggggttgagcctgcgcattggatagcgagcagatattggcttaatacgacccggcgttccaattctttggcccggacatcagtacattgtgagaagtcggcaacagctccctgtgtccagtaatttttccagtgtccggaagagacttgttgtacttctgtaaaagtcagaatgggagaagcggatacttgtggtgtgaattggcaggtgaatgtaaatatactgtccgttggcgtgagtacgaaatagtttgcacttttctcacttagcttcgcagggccttcccaactgattgttacataataggtggttgcgtcgagtgttctttttaacacggccgattgtgcgtcttcactgatcagggtcgtgctatgcttatcattcgcctcccaattacaagcatcgtcacagtgaccgcccgtgggataggggaagtgaaacttgatgccggcaggttgtcgggccgataggcgtgcggcaatcatatcacgctccggatggcagactgtctgaatgtagtagggagtttctttgagagtgaaccggctgttgataataccgttccacatatccagtgattgctgtatgttttgcacatccgagggacgtacttcatttcctaattcgagtccgatgatacccagatgcaggcggtgtgggtttacacgataccagtcggatgcttcctttgctctgccgggttctttgggttgggtggcatatagctctttgtgcccgtggccgaagtcatactccaccaaggcttcctccggtttatagttttcgggatttccgaagctgtgccatccccattggctttgtgtacccagtggaactccgtttttatagacttcgggaaaagtctgcaatcctgtagcatctaccgtataggcaaattctccgttccctaccgacagggaggataatgaatccatggcagtcacttccggattattgcgtgttaccagtgcatggcggtctatggctttctctttgggaggggtgcaagcagccaatgcaaacattgtcagagcataaatggtgtgtttcattgtatatagctaatttaaaaagatggataattctgttgtttatgcgatatgattctatttgccaagctgcaggcaacccatgatgaaaggaccggtagctttggcatcgttgtcacgcattttttcgccaatgtaatattcaaagcttccgtcgcggtaaggagtgccgcctagtccgcctacttggcagcaacgggtcagcgtcagagttccgtcggggttctcgagaagcaatgtttgctttaatccgttgaaggctttttccgcgatggtccggtattgggcatctatatatcctttgttcaccgctttggcataagcatacatacattgggtggttacggatgcttcgggaaaattaccttcacgctcgggctggtctattacctgataccatagaccgtctctttgatagttgggcaggctttctgccaaaccttgaatccaactgataagcgaggcacgtccggggtggttgtcgggaatatagtccagtacatctaccatggccatgaaccaccagcctatactgcgtccccaaaaattaggtgaagtaccgtcttgcggatttgcccaacgttgggatttgctctcgtcccaggcatgatgatataatccggtttccggtgaataggtatgtttgtggcaaagtgtgaattgttttaccgcctcatcaatcagatcaggacggttgaattccgctccatagcgggctaggaaaggggaagccatataaagtccgtccagccacatctgatgttgatagatcaatttatgccagaagccaccttccagcgtacgtggttgtcttttgagttgttctaccagtaagtccatagctgctttgtatttttctttgcctgtttctttatagaggtcaaacagaacttttcctgaattgatgtaatctaggttgtaagttgacatatcatagaggtggatttctcctttttcgttaatcaaactatccgcccattcctcaacataagtaaagtaacgtttgtcaccggtatttttccacatatccagcatggcgcaacagcctactccttgtgaatacccgaaaaagagccgtttgccatgatctagctgataggctttgggaaagcggagcatctcagagtcggcaaagcgctgggcatatgaatcggaagatataccgggaaggggtgtggggactgtagggagaggggctatgcatacttctccactgtacggaattgcttttttagcttggagagacatgggtgccatgcaggcggccaataaatagatgtaacagtaatttttcatggtatttcctgtcgtttttatagtctttgaatgatttacattttttgctgatgtaaaaataggctaattaacgctataagtccatgaataattgttcatttagatggaaaatctatcggttgagtctcttttttaaggaatatgtgtcaataaagaacgaatttgtggaaaaaatggtaagacagagaaaaactgttcacccatttgtcatttagaaggaaataaggaatgacaaatggatgaacttgatgagaatatcagttgtgtaccagtgttcctatattttcaccggtcattacttttttcaggttacctactgtgtccatgtcgaaaacgataatgggtaggttgttttccttgcacatgcaggttgctgtaagatccattactttcaaaccgcgctttaatacctcatcgtaggtgatatcgtcaaatttcgtagcagtggggtccttttcaggatcagctgtataaatgccgtccacgcgtgttcctttcagcatcacatcggcttctatctcgataccacgtagggaagacccggtatcggtagtaaaaaacggattgcctgttccggcagacataattacaacttctccgttttccatcgcttcaatcgctttccatttgttgtaaaactcaccgatgggttccatgcggatagctgtcaatacacgtgccttgactccggctgctcccaatgcggaactcaatcccaagctgttgataacggttgccaacattcccatttggtcaccttttacacggtcaaaacctttagaagctccactcagcccacggaagatatttccaccaccgattacaatacctatttgtacgccaaggtcgtgtatctccttgatttgttgcgcatattcacccagacgcttttcgtctataccatattgcttttcgcccatcaggctttcgccgctcagctttagtagaattcttttaaatcttgccatattggtttgttttttagttttttgcaaagataaaaatattaatcttttttacttgttttatatcctaaaatatttcttcccataactccttgcattactccgcgaagtagaagataggtaatgaatgccatccataaagcgtgattgcccattgctccccggaaaccgtagtaaataagaaagaaactgacagaagctgctatcatggctttcagcatcagatgggtggctgtcgcaccgatgaatattccatcgaacaaaaaagcagagaagcctgccaaaggaatggcaagtacccaataaaaataactttcggaagcatgaatgacagttgtttcgttagtcagtaatccgagaaaggattgtcctcctatactatataataaggtgaaagtaagtgataatcctagtccccagccgaatagttggcgaaccgtcgtgtggagtgctttctgattattggctccgatatatcttcctgtcaatgcttctccggcgtatgcgaagccgtccataatgtaggagaataaagtgaataattgcataagtaatgtattgaccgccaacaccacttctccttgtgccgcacctgccgaggtgaaaaagacagtaaccgccaccaggcagatggtacggaaaaagatatccctgtttacttggaagaaacggtacatggcctgtttgtcaaagaaggaatgccattctatgcgtttccgcagggtgctgtagtagcgtaaccacaacaaatatgccatgactagcccggcatattgtgcagttaacgttccgatagcgacaccttctattttcattcctaatccatatactagaagaagactgaccgcaatgttcactatattttgtgtgatggctatatacatggggaaacgggaattttgcataccgatataccagccggcaaaactgtaaagccctaatacagccggtgctccccaaatacagatacggaaatagagaccggccagatgttctacttcttcagtcgtttggataaaggtgaatgcaattctttctataggatattgcaaggctagcaaagtaaatgcaatgaataatcctactccgacggaacggagtagtaaccgggtgacttcattcaggtcgtgcctgccgtatgcttgtgaagtcatgccgctggttcccatacgcagaaaaccgaaaatccagtagatgatgttgaaaagcattccgcctacagctattgctccgatgtaggcggcagagcccaaatgacctacaatagtaacatcaatcaaacccaacagaggaactgtaatgtttgaaacgatagaagggatggcaatttgaagtatttttttgtttccgttattaagttgaatcatgagtgtagattgatagagatggatacaaaggtactctctttctcataaataaccaatgaaaatttaaatttgaactgaaatttgttgttgtttaagatgatatatcattggattatagatatatttgcggttattaaaatgatcaaaacaggagaattatgaaagagaattttcaaatccatatttggttgggcttattgttatgtctgttaggtatgtcatgttcggatgatactccggctaaaggaaatgaaccgggaaatggcaacacggagttggaagtcaatgagtggatagagagtgtcatgcgcagtgattatttgtggaataacgacattcctgctcaaaataaattggatttctctgctgatccccaaacattttttagctctatgctcagtttgaaagatggaaagacgagaaacggaaagcatctttattattattcttatatggagaagaataaagattataaagcacgtaccagcattgatgcggatgatacttatggtatggagtttactttatttaatgttgtaaacgatagtaatcaacctttaggatattattatgcccgtatcctgtatgttcttcctaatagtccggcatcaagtgcaggtttggaaagaggggattggatcgtgggtattaaagggaaaaataatattaattccgataattatggaatcttattaaatggggataggactcaatggctcgtcaaacgtggcgatacagaggtcagaactattgatatagaagcttcccgggccgtggaggacaatcccttattctatcacaatgtatatactcggggagataaaaagatagggtatttggtttataatcattttactcccggaccgaatgggtattcggatcgtacctatgatgaggaaatgaagaagatatttgccggatttcaggcacaaggtgtgaacgaatttgtgttggacttgcgatataatggaggtggatatgagaattctgctaatatgcttgcaggactcctcataccagaagcttctcgaaaaaaagtatttgctgttttctctgacaataaaggacaatcctattctaatgatttttgtgtggagacgaaaggaacggcaggttacttgaaacttaattccaatcgaatttatatattgacaagccaaagtacggcttcttcttcggaagtcgttattaacagcctcaacccatttatggatgttatccttattggtgaattgacagaaggaaaaaatgtaggaatggagatgcagaaaaatgataaatatgaatggatgtattggcctattacattgagagtgactaatgcggtgaattatgactacagtgccggttttaaaccggatatagaatggaacgagtatgatttgactcaaaatccgacggacgctttattaccattgggtgatccggatgaattcatgctgggtaaagccatctccttgattacaggagtaaaacgatcagccagaggcatgaatacgttatctaaatcgattatgaggggggaatctgtgtatcaatcgacagaacgtcatgccactggaggaatgttgatggttcctgaagggaaggacaactaaaggatatatttaacttctttgaaggtatattttctaagagaaccgtttttatctttcagaatcaaatgtccgtcgggttccacacggatcagtttggcagtaaactctccttttgcatcgcaataggggtgataaccttccttgcgatattgtgctttcaggtagtattcctgaattttggtgatgatatcagtttctctgttttctatccgggaatagaggtttatgatatgttccaatacgctgtttaaaacttccattctgtctgtttccttttgagtaatttgtcttaatgaaacagggttgggggcggatgaatgaaattcttcctggttaatattgattcctattccaacaatgctttgtgaaatttggcttcctgttaaatcattttcaatcaatatgccgactatttttttgtctttccaatagatatcattgggccattttatttgcaggcaatctgcatggacgtaatgggccaatgcggtacgaatggcagaagctaccgccatagataaaatgaactgactggcgggggcgattgtttggggataaaatacagtgctgaatgtcagattcttgccatattctgattcccatgaattcccacgctgcccttttccggcggtttgatattctgccataagcgtggtgaattccttgatttctttttcctgacaaagttctgcaagtcggtcgtttgtagaggttacagtttcttcttttaagattttgcttaaccagttaggggattttatcatattcttttttaagtttacgggtgaattttttgataacctcttcgtatgagtggtctatcagtaataaaatcagtttgtcgtcaatgtcaccttgtaatgatacttggttccaatatttcttattgaagtgataggctccttcaatgccggaatgatgttctcttaattccaaggcatattcgggtttacattttaaagatagccattccgggttgtccaatccgatgcaggcatacattttccccatgactttgaatactaaggtgacattatcaaaaggaaattcttctgttgttcctttctttctgatacagtaatcgcgtattgtttctatgtccatatataatgtatatatttctaccaaatcggaggataaaaggcttcttcaatatgctctatagtgaaaggagccttttcgcccactaaggtgatgatatcaaaacgtacaggtaaatctactgagaacttacgcaagtatacatcagttgaagctatgattctgcgaattttcttatctgttactgcatcttccggattaccgaatctagtattcttgcgggtctttacctctataacaattagttcgtttcgatattcggcgacaatatccagttcttttttcccgcaatgccaattccggtggcggatggaatatcctttatctatgagatatgcagcggcctcttcttctccctccttgccaaattcgttgtgttctgccattctgtttctttttgcgcaaaaatactcttttttatgctttgtatttacagaagtaaag

SEQ ID NO: 14405 - DNA, 63177 bp, Unknown
  gut microbiota DNA sequence
atataaatataaatcatgaataaatctaggtatgtttttttcattttggcttgtttattcggtttgtacgtgcaagctcagaatagaacagtgaaaggacgtgttctctcagcagaggataaagaaccattaattggagctactgtcaaaatacccggtacatctatcggtgtggtgacagatatagatggcaatttctctctggaagttcccaacaaagacaaaacattagtgattgagtttttaggtatgagtacactaacggcgaagatacctgccaatggggtactgaatgtatctttacgtccggatacacaacgattggacgaggttgtggtgacaggctatggtaatttttccaaatcctcatttaccggttcggcaaatacattacggggggacttgttgaagaacgttccggttgtatcggtagaacagaagttgcagggtatgactccgggtgtgtccatttcgggaaattccggtcagccgggtgctaatcaaagtatacgtattcgcggtatggggtcattcaatgcatcgaaagaacctttgtttgtcattgacggagtaccggtgacttccggaagcttgagtggtggctcggcagatgccgcttacatgaataattctaaaacgaatataatgagtacgctgaacccttcggatattgaaaatataacagtcataaaggatgcggcggcggcttctttatatggttcacgtgcggcaaacggtgtgattctgataaccactaaaaaaggtacaaagggacgtgctaaggctacattaaaaattgatggtggcttttctaatgctgctgtggaattccgtccaacgttgaatggggagcagcgtagagagctaatttatgaaggtttgatgaactttcagcaagatgagatagccaagaatccggaggcgggattggcgtcgcccacagagtatgctgatttacatatcaatgattatgcctccattccggaactgggatatactgactggagaaaggaattaatgcgtacggcacatcatcaaagttatgaagcgtccgtatcgggaggtaatgacaagactacgttctattcttcattgggttttaaccgtcaggagggtttggtggaaaattctaatctagatagatatacagcgcgtttgaatgtaacccagaaggtaggttcccgtggggaagtgggtgccaatgtgatgttctctcaattgaatcaggaaatgaatgaggagcgtggatcatctattaatcctttcctttgtgtggctttgaacaccactccgtcttttccggtacgtgacgctgaagggaattatgtagggtcatatcccagtagcaatgtgaatccgttgcgtgatatccgtacagattataaccgtacccgcatgacacgtatgttttctacaggctatgcttcgatagatattatcaaagggttgaaattaaaagaaacgcttagctatgattataatattcagaaagattcccgttattggaatccgttgagtggagccggagctaaaagtggtagtgatgcacagacggcaaagggatttatagaatatagtaaattgatttcttccacttcattgggatacaatacgactatagcacagttgcaccatgtggacgcattgatagcttatgaaattgaaaattatcagactgacaaagcaatgggggataaatccaaacttccttcagattatttggtggaaccggataatgcagcatcattgaacagctttgtgtcttctactcaggattcaagaatgatttcttatgtatcccgtatcaactatgattatgatgaccgttactatattgctggtagctttcgtcgtgacggcagttcacgcctgtcacccgagaaccgttggggaaatttttggtctgtatccggtatgtggaatgtaggtgcggaaaaatttatgcaatctataaagagtgtgctgagtgatttaaagatacgtgcctcgtatggtgtgaatggtaatcaaccgggtgctctttacggatatatgggactttattcctacgggcagaattatatgggaggcggtggatcttatgaatcggcattaccgaacccgaaccttaaatgggaaaagaactataacttgaatttgggactcgacctggcatttatcaatcgtatttttgtcagcttggaatattataatcgcgatacgaaagatttgctttacaatcgtcctatcagtagcactaccggtttccaaaattatttggggaatttgggacaactgaataatagaggttgggaactggaactgcgtaccataaactttgccggtagcaactttaattggacttctgttttgaatatgacccacaataaaaataagattgtatcattggatggtaaattggaacagtctatcgagggaagctggtttatccataaagtggggttgccgtattctaccttctatgtgaaagaatatgcgggggttgatcctcaaacaggaaaagctttgtactatatgaatacacaggatgcaaatggcaattatgacaaaacagttactactgacgcttctgcagcacaggcaattccttataagtctgtggatccgaaaatttcaggaggttttaccaatatcgtgaattacaaatggtttgatttagcattgacattgacttattctttaggaggatattcttttgacaaaaccggaacttataatgaaaccgacggtgcaaaagagcagaactataacttgcccatttatgaattggatcgttggcaaaagccgggtgatgtgacagatgtaccccgatttgtacttggccaagcagcaggaccgcagaattcatcccgttatgtacatagcacggatcatttacgtgtaaagaacttgactttgggctttacattgccagatcagtggttgaccaaactgggtgtcagtaaagcaagattgtatttctcaggcagtaacttgttgacgtgggcaaagtgggaccagtatgatccggaagtgcctgtttccggtgaagtattttgtgaaacacctcctatgcgtacttacagttttggaatagaagtctctttttaatgaatttcctttaaattagaacgaaatgaaaaaaatatatttatcgattgttgcggctgtatcattgatgtttgtttcgtgtactgctgattggctgaatacagatccttctacggcagttcctagtgatgatgccattaaaaatatagatgatgcacaggtggcattgaatggtatataccgattagcatccgcacatagttattatggtgataattatctttattatgctgattgtcgtggagaagatgtgcaggcacgtattaataaaggagcaggccgcagggtttctccttactatttctttgatgttacggcggatgataattttaatataacccttgtctggaaccaaccctataaagtgatccatcaggctaacagtctgatagaaaagttggatgcggggaatgcggggaatgccaagccggaagaagtggcacggattaaatcggaggcactggcaatgagaggactggctttatttgatctgacccgtttatttggtatgccttatactttggataatggggcttctttgggagttcctattgagattcagaccaccttggaggatcatgctccggaacgtaacacagtggcacaatgttacgaacaagtgctaaaggacttgaacgatgcgttgggaggactgacaaaagaaaaacatgatgcctatatgaattattggagtgtgaaagctttactttcccgggtgtatctgtatatgaatgacaatgaaaatgcattgaaatgtgcagaagaagtaatcaatgacaatgggggaatttaccggctttttactcatgatgaatatccttctgtatggggaaaagacttcaactcagagtctttgtttgaattctattttacgatgtctgaaccttcaggcggttcgggaggagaaggggcgccgatggtgtatgccgataatgtgaaagattggaataacctgattctgacaaaggcttatttggatttgctgaatgaagaccctgaagatgtgcgccatgtatttcctcatttgccggaaaatgcagttgcagatacattgcctgtagctgccaaaggtcaaccgaaatatctgattaaatatccggggaaatcgggcagtgtgaccgatgctgtttctacagtcaatccacaggataatgatctttgtattctccgtttatccgaggtctatttgaatgctgcggaagctgcttttaaaatcggcaatacggaaaaagcattgacatatctgaatgcgatagttacccgtgccaatccagcgaaatccgtaacatctgctgatctcagcttggagcgcattttgaaagaaagacgtaaagaactggtaggtgaaggtcatgctttctttgattatatgcgtaatggcaagtcagtggaccgttcaggaggctggcatctgactatgcctgaagatgctcgtgtcattactccttcagaccctagggtggcacttcctattccacaaactgaaattgatgctaatccgaatatagttcaaaatcctagataattgttttgtccatgttaagtttgcccttcttttcgatgatgatatcggagagaagggttttctttttacaatttatatggtacaaaatcatatttcgtccgtcttcatttgaaaagaaagagcaaaaatatgagaatatatggattgttactgtgcggatggatgacggtatccttacaggcccaacaaatacatgattgggagaatcatcatgtattacagattaatcgggaaccggcaagggctgcttttgtgccttttgccaagcagaagggggattgttcgatgagtctggacgggatgtggaaattccggtggactcctgtgccttccgaacggatagcggatttctaccgtacggactttaatgacgaggattggaaaagttttccggttcctgccaattgggaaatcaacggatacggaacacctatttatgtatcggcaggatatccgtttaaaatagatcctccacgggtaatgggggagcctaaagcttcgtataccacctacaaggaacgtaatccggtgggacaataccggcgtacttttattttaccggctgggtggaaagcggatgggcagacttttcttcgttttgaaggagtgatgagcgctttttatgtatggataaacggtgaacgtatagggtatagccagggaagtatggaacctagtgagttcaatatcacccgttggttgaaaccgggagagaaccaaatagctttagaggtttatcggtatagtgacggatcttatttggaagatcaggatttttggcgttttggaggtattcatcgcagtattcatttggtgcatactccagatatccgtatccgtgactatgtagtgcgtaccctccctgctgttcaggggaattatcaagatttcagactgctgattgatccgcagttcagcgtttatcagggaatggacggtaaaggctatacgttgcaggcagtgctgaaggatgcggatggaagagaaatagtgaatatggttggcaatgtggaagatatcttggatttggagcataaggcggcacggatgaatgaatggtatccgcaacgtggtccacgtaagatgggacgtatgtccgccgttataaaatctccacaacgttggacagccgaaactccttatttatataagttggagcttcgtttacagaatgtaaacggacagaccatagagcaagtggaacagccggtaggttttcgttgtattgaaataaaagacggacaaatgttggttaacggtaattctgtccgctttcgtggggtaaaccgtcatgaacacgatccgtatacggcacgcgtgatgagtgaggagagaatgttgcaggatatattattgatgaaacaagccaatgtgaatgcagtccgtaccagtcactatcccaatgtgagccgttggtacgaactgtgtgacagcttgggactgtatgtgatggatgaggcggatatagaagagcacggattgcgtggaacattggccagtacacccgattggtacgccgcttttctggatcgtgcggtacgtatggcggaacgcgataaaaatcatccttcggtagtgatgtggagcatgggaaatgaaagtggttacggacctaattttgctgctatttcggcttggctacatgattttgatcctacacgtcccgtacactatgaaggagctcagggagtgaacggagaacccgatccgaaaacggtggatgtaatcagccgtttctatacccgtgtgaaacaggagtatctgaatcccggcattcccgaaggggaagacaaggaacgggcggagaacgcacgttgggaacgcctgttggaaatagcggaacgcacgaatgataaccgtcctgtgatgaccagcgaatatgcacattgcatgggaaatgctttaggtaatttcaaggaatattgggatgagatttatagtaactcacgtatgctgggcggctttatatgggactgggtggatcaaggtatttataagatattgccggatggccgccagatggtggcgtatggcggtgattttggtgatcagcctaatttaaaggctttttgttttaatggtgtggtgatgagtgaccgcgaaactacgcccaaatattgggaggtgaagaaagtatatgccccggttaaattggaaatggaaaaagatcttcaggtttttccaaaagaacaagatcttttagtaaaagaacaagatgttttgcccaaaggattaagagttacgaaccgcaatcaccacattggtctggaaggatatcgctgtctgtggactttgatagagaatgggaagaagatggaacaaggggaactggcgcttccattggtggcacccggtgaaacgggaacgatggctttgcccgatgtcaagattaataagcaggctgatgttcgattgaatgtaagtatagtattgaaagaagatgctttatgggcgaaagccgggcatgagattttaaaggaacagtttgccttgaatgatcatttgatggcggtggctaacggtgtacaaccgggtaaacgtaaaaataagttttctgttttggatttatggaaagatagttattttcaggctttccgtgctccgacggataatgataaaagtttcggtaactggttggccaaggattggaagaatcagagattggatgctcctcaagtagaggtgattactcccgaaacggaaactcaggaaacgaatggcaccgtatcgaggaaatcggttgtgaaatatcgttatgccaaaggtagcatccgtgtctcttcccattataaaatatatgtggatggaacggtggatttggaacagacttatctgccacaaggagaattgccggaattgcctcgtctgggtagtgcatttgtattgggagaagaatacgagaatctttcctggtacggtcgtggcccgtgggaaaattatcccgaccgtaagacgtcctgtttgataggcagatggagcagcaaggtgagcagtcaatatacacattacccccgtcctcaggacagtggcaatcacgaggatgtcacagaggtgacccttaccaataaagaagggaaaggtatccgtgtgacagccatagaccggccattttcattttcggccttatattatactgtggatgatatttataaagcaactcatgattgtgacttgaaaccacgaaaggagattattctcagcctggatgctgcggttttaggtttaggaaacagtagttgtggtccgggagtgctgaagaagtatgccattgataagcagaaacctcatactttgcgggtacgtttcagtcttattaaatgacatatggcaaaaggtgtgaatgagcgacacatcttttcgggaagcagtcggaaaaatagaattaaattaaaaatcaaatatcaaaatgaaaagaacaacaacttttttatcactccttgctttatcggcaggtttgttggcgcaatcttccgtaaaaacagaacgccaatacttgtcaggacgtggctgtgatgatatggtacaatgggatttcatgtgtaccggtggtaataattccggaaaatggacgaaaatcggagtaccttcttgttgggagctgcaaggattcggtacttatcagtatggtatgaaattctatggtaaggcttttcctgaaggagtagctgatgaacaaggtttgtataaatatgaatttgagttgcctgccgaatggaatggtaaacagatagagctggtatttgaaggctctatgactgatacgcaggtaaagataaatggtcgtaaagctggctccatgcatcagggagctttttaccgctttatttataatgtgagtgaccgggtattcttcggatcgaaaaaaaagaatgtacttgaagtaactgtaagcaaggaaagtgcgaatgcaggggttaatttggcagaacgccgtgctgattattggaatttcggaggtattttccgtcctgtgtttatcgtggcgaaaccagctcaaaatatcgatcgtctggcaatagatgcgaaggcggatgggaatttctatgctgattgttttctgaatatggcagtagaaggtgctagggtacatactgtcataacagatgttaaagggaaaaaagtggccgaaaatacttcggatgtccgtacaggtagcgatcatgcttcgattaatttcactgtaaaatctcctgaattatggacagctgaaactccgactatgtatcaggctacgtttactttgcttgataaagccggtaaaaccctgcatgttgaaaatcagaaatttggtttccgtacgattgagacacgtgaaagtgacggattgtatatcaatggtcagcgtgtgatgattaaaggagtgaaccggcatagcttccgtcctgaaagcggacgtacactgagcaaggcaaagaatattgaagatgtattgcttatcaaaagcatgaacatgaatgctgttcgtctaagtcattatcctgctgatcccgaattctttgaagcttgtgactctttgggactttatgtaatggatgaattgagtggctggcatggcaagcacgaaactatcaacgggcagaagctggtaaaagaaatgattacccgtgatgtaaaccatccgtgtattatctggtggagcaatggtaatgaaaaaggctggaatactgaattggatggtgaatttcataaatatgatcctcagaaacgtccggtgcttcatccgcaaggcaacttcagcggatatgaaactatgcactatcgttcttatggagaaagccagaactatatgcgtctgccagaaatatttatgccgaccgaattcttgcacgggttgtatgatgggggccatggagcaggattgtatgattattgggaaatgatgcgtaaacatcctcgttgtgccggaggttttctttgggtgctggctgacgagggcgtgaagcgtgtggatatgaatggattcattgacaactgcggcaattatggagctgatggtattgtaggaccgcaccacgaaaaagagggaagttattttaccatcaagcaggtgtggtgtcctattcaaatcagggttgatagccttgacagtcagtttgacggcaaactgagaatagagaaccggtacgattttttgaatgcgaatacttgccgtttcacctataaatatgtacaattgccttctgtgaccgataaggggggaatgaaagtgatgaaacagggagaggtgaactgtcccgacattcctgctcacggtgtgggtacactgactattcctgcggctatgaagggagccaatgctctactgctgaccgttacggataaaaatgggaatgacctttttacatggagctataaactggaagacattgccggattgcaacaggtttctgccggaaacaagccttcttataaagaaactgccgatgcattgacggttgatgctggaggacgtacatttactttctctcagaaagacggacaactgaaaggggtgaagattggaagccgtaccatcagcctgacaaatggacctcgttttattgctgcgaagcgttcggaccgttctatggaccagttttacaaccatgatgacaaagaggctgaaaagaagaaaacccaatatacaacatttgaggatgctggttgtttcacgggctttagcgtgcgtgaagaaggcaataacgtagtagttaccgctaactacaaactgggatgttttgatcaggctgtatggactatctcccctgacggtaccgctgctatagactttacatacaactttagtggtgttgtggatttgatgggggtgatgtttgattatccggaagataaagtgttgagcaagcgttgggtaggtgacggcccttaccgtgtatggcagaaccgtctgcatggcccgcagttgggcgtatgggaaaatgagtataatgatcccattcctgctgaaagttttacttatcccgaatttaaagggtacttcgctaatgtgcaatggatgactttggaaacacaggaaggaatgataagtatttgtaaccgtactcctcagaattatgtaggggtttatcagcctcgcgacggtcgtgacggcttgctttatactttccctgttaccggtatcagtctgatgaaagtaattcctccggttcgtaataaagtgaatacgacagatttgataggtccgtcttcacaagcattttgggctgatggagaatatggaggaggtatcacgttaaaatttgaataacagtgaaaaaatagattgtaaagggaagagaaactttgtttattcttcccttttcttttttatttgacttgaactctctatatttgagaaattgagtacaaattacaactttgttcgtttattattaaatatagaataaataacttatgaagataaaacatctgtttgtatccatattgctggtaaccggattccaaccgatgatagcacaatccgctttacggcaacagtttgtaaattcacccgtacaggaagctcgtccttggactttctggtattggatgtttggcgctgtaactcccgaagggattactgcagatttggaggccatgcatcgtataggtttgggtggggcctatctgatgcctattaagggagtagagcaaggacctcaatacgagggaaaagcccagcagcttacccctgaatggtggcgtatggtcactcatagtatgagagaggctgataggctaggcatgcagttgggaatgcatatctgtgatggctttgccttggcgggaggtccttggataacttccgaagagtcgatgcaaaaagtggtatggagtgatactatagtgaacggtgggaatattcgtaatttgactttgcccatgcccgaagcactggatggctattatgaagatatcgttacctacgccattccattggagcgtcagcctgaggatacttcattgaagccgaaggtaactttcggcaatttgaaatcggccgttattaaagatgaatccaaagctgtgaacagagatgaaaaaggagttttccgttcctcttatccttgttggattcagtatgaatatgcagaacctgtgacttgcagtaatgtggaaattattttgggaggaaataactaccaggcacatcgcctgaaagtattggccagtgaggatggacggacattcaaaacagtgaagcaactggttcctgcccggcagggatggcagaatacggatttccagtccactcatgctatccctcctgttaccgcccgttacttccgttttgagtggactcccgtgggaagtgaaccgggtagtgaagatttggatgcagccaaatggaaaccgaatttgaaaatcaatgatatagtccttcatacggctccacgtattcatcaatgggagggaaaagcaggactggtgtggcgtgtagctactgctactacttcgacggaaatacctgatgcggcatgtgtgcagccggatgaattgatcaatctccctttgtatcagggcaggctgaccgcccgtttacccgaaggtaaatggcgtattctccgcatgggacatacggcaaccggacatgtaaatgctactgccggaggtggtaaaggattggaatgcgacaagttcagtaccaaggctgttcagaaacagttctcgaactggtttgcggaaatgttcaaaaagacggatgaagccgtggcacgccgtgtgttgaaatatatgcacgtagacagttgggagtgtggcagtcagaactggagtgataacttcgcggcggaatttaagaaacgtcgtggatatgatttgatgccttatcttcctttgctggcaggtattccgatggaaagcgccgctcgcagtgagcagatattgcgggatgtccgtaccaccatcggagaactggtgactgatgtgttctacaccgtattggctgattgtgcccgtcaatatgattgtcgtttttctgccgagtgcgtagctcctactatggtcagtgacggattgatgcattatcagaaagtggatttgcctatgggggaattttggttgaacagtcctacgcatgataaacccaatgatatgctggatgccatcagcggtgcgcatatttatggaaagaatattatccaggccgaaggctttactgaaattcgtggcgtatgggatgaagaccctgccatgctgaaacctttgctggaccgtaactatgcactgggtattaataagctcttttttcatgtctatacccataatccctggatgaaccaccgacctggtatgacattggacggcatcggactcttcttccagcgcgaccagacctggtgggaggaaggaaaatcttttgtagattacatcacccgttgccagactttgttgcaatacggtcatccggtggctgatatcgccgtctttaccggtgaagaaatgccacgacgttccattttacccgaacggttagtttcgatgcttcccggtatctatggagccgaacgggtggaaagcgaacggattcggctggctaatgaaggtcaacctacccgtgtgcgtcctgtcggtgttacccattcggcaaacatggccgatcccgaagactgggtgaacccgatgcgtggctatgcctacgattctttcaacaaagatgctctgttacgtttggcaaaagcggagaatggaagaatggtacttccgggaggagcttcttataaagtattggtgcttcctacagcccgtcctatgaatcctgataacctgccgttgtctcctgaggcacaggcaaaagtagaggaactccgtgtggcaggtgtcattattccgaaattgccttatcgggaagatgatttttcttctttcggtgtggaacgggatgtacttcttcctgctgatgtggcatatactcatcggagtggggaagagtatgagatttattttgtagccaatcaggtggacagtttgcgtacattcaatgcttctttccgcattgcgggacgcacgcctgaattgtggaatgcggtaacaggaaccataactcgtccagcacaatggaaagaagcgaacggtcgtaccgaagtcgctttgtctttgcctgccaatggatctgtatttgtagtattccccaaagaatattcagaagtttctccggaacggaccgaaagggaacctgtatccatattgatcaaggaatggacagtaacattcccctctgtgcgtaagactgtcactcgtccggcattatttgactggagtaaggaagaggatgaaaaaataagatattatgccggacatgctacttacagagggttattcagatggaagaatgaacaggacggaagaatcattcttcgcttgggaaaagtggccaatgtggcgactgtacgtgtcaacagcattgcatgcggtacagcttggacagctccctatgaagtggatattaccgatgcgcttcgtaacggaaccaatgtattggaagtggaggtagtgaatacttgggcgaatgcgctccgtggggctgatttggataaagcgccttttgaggggatatggacgaatgcaaaattccgtctgcccggagatgatttgttgcctgccggatggatgggaccttgcgagttttttaaaactaaagaataatggtaatcacacataatatgaaaaataagaaactactactgggaattgcttgggcatggttgatttgcctgtcggcaaatgcggaagtgaaattgcccgctttcttttcagatggcatggtgatgcagcagcagactcgtgccaatttatggggaacagctactcccaatgcatcggtgaaaattacaacaagttgggataaacaaacctataaaattactgccgatgcaaaaggcgcgtggaaacttgctttatccaccccctctgccggaggtccttacacgattacttttgatgatggaaagttgactgaaatacgtgatatcctgatgggggaattatggttatgctccggtcaaagtaatatggaaatgcccatgaaaggttttaaaaaccagccggtggagaatagcaatacagatgtgatgaacagccgtaatccgcaactccgcctgttcaccgtaaagcgggcttcctcttttactccgaaaacagatgtggtaggaacctggcaggaagctgttccggcaaccgtgcgtgaatttagtgctactgcttattacttcggtcggatgatacaacagcagttgaatatacctgtgggtttgattgtggcttcttggggaggctctgcctgtgaagcctggatgcatccggattggttgaaggcatttcccgaagcaaagattccccaatcggaagccgatatcaagtcaaagaaccgtactccgactgtactctataacggtatgcttcatccgctcatcggattagccatgcgtggagttatctggtatcagggggaagataactataaccgggcttctacttatgccgatatgttcagtgcactgatacgcgggtggcgcgaagaatggcagcaaggggaatttcccttctattattgtcaaattgcaccttatgattatggaattattactgagcctggcaagaatgtgataaattctgcttatcttcgcgaacaacaagctatggtagaacaccgggtgggcaatagtggtatggctgtattgttggacgcaggaatgaaaacggggattcatccgggtaaaaagagggtagcaggagaacgtctggggcgtttggcattagtaaaaacttacggaatgaaaggtgttacggccgaaagtccttactatgcaggaatggaagtaaagaatgatacggtaatagtcagttttgatcgggcgccgatgtggataaattgtaaagaccgttttgaatcatataactttcaggttgcaggcaaagatcgggttttttatcctgctaaagcgtggatacagagaagtaaaatgcttgtaaagagcgaaagagtacctcatccggtggcagttcgttatggtttcgaaaattatgtggaaggagatttgtttggtgaagatttacctgtgtcgtctttccgttccgatgactggtaaaaacagaaaaaaatgaagaatatctttacgtttttattattagtatttattggcgggcagtttctgtggggacagcctgccaatttggtttggaatactcaaagccggaatgcttcggagtccatgccttgcggaggtggggatatcggtatgaatgtatgggtagagaatgatgatgttctgttctaccttagtcgtagcggttcttttgacgagaataactgtctgttgaagcagggacggtttcgtgtgaggctcactccgaacccttttgccggaacggcttcttttcggcagactctgcatcttaatgatggttatgtcagcgtaagtagtgataatgctactcttattatttgggtggatgtgtttcatcctgtggtacatgttgaggtgaagacgaaggaactgacttctatgcgtgtaaactttgaaagctggcgttatgaagatcgtccggtgcgtaaaggggaagggcagcaatgctcttacaaatgggtcattcctgatggattgatgactaagcgtgactctgtctgtgtggaagaagataattttactttctttcatcggaatcctgatcggactatttttgatgtggtagtagaccaacaaggtatgaatgaggttaaggaacaattatataatcctctgaaaaatctaatatttggcggtcggttatccggtgataatctggtttataccggtacacgtcgtgggcattatgcgggaactgaatatctggcatggatgtataaaagtaaaaaacctgtatataagcaatctgtgcacattgccttgaatacggaacaaggtacggttcctgcatgggaagcatcattggcccgtactgagaaggaaataaatgtatccaaagacaaacaggctacccgtcgttggtggaatgatttttggaaacgtagctttattgagggggaaggtgaagcgggagatgctatccgtaactatacactgttccgctatatgttgggatgtaacgcctatagccagtggcctacaaagtttaacgggggactgtttacttttgatcctatgtatgtggatcagataatggaattcacccctgatttccggaaatggggaggaggaaccatgactgcacagaatcagcgtttggtttattggcctatgttgaaaagcggtgactttgacttgatgaaatcacaatttgacttttatctgcgtttgttgccgacagccgaagcgcgtactcgtgcctattggggacatgctggcgcttgtttcactgagcaaatggagaactttggtcttcctaaccctgcagagtatggttttaagcgtcctgcgagttttgataaaggcttggaatataatgcatggttagaatacgaatgggataccgttcttgagttctgtcagatgatattggaaacagcacgttatgacagtttggatatcagctgttatactcctttaatagaaagttcgcttagtttctttgatgaacattatcgtcagcttgcgttacaacgtggccgtaaggatttggatggtagcggtaaactagtgatttatccaggatcggcttgtgaaacttataagatggcctacaatccatcctcaaccattgctgcactgcgctctgttttacaaacttataggcgtaaaccggatatgctggcacgtattcctgagattcctttgcgcatagtggatgggaaggaaatgattgctccggcacaggtttgggaacgggtgaataatattgaaacccctcaactttatcccgtgtttccctggcgtatttacggagtgggcagggaaggtctggaaatagctcgtaatacctatttatatgatcctgatgcccagaaattccgttcccataccgggtggaagcaagataatatttgggcagcctgtctgggaatgacagaggaggctgcacaacttaccttagagaaaatggcaaacggccctcatcgttttcccgctttttggggaccaggctatgactggacgcctgatcataactggggaggcagtggcatgataggtatgcaggaaatgctgttgcaggaagccgatggaaagattttattgtttcctgcgtggccaaaagattggaatgtgcatttcaaattgcatgctacagggcaaaccactgtagaagctactctgaaagagggtgcagtggttagcttgaccgtacaacctaaagaacgggaaaaagatgtggtaaattgtttactgaataaataatttagggttaaggagatgagtttcttttagattcatctcctttttctttaaatataatcaaattcagaacttgtcactcctttcgtttttccattcttgtctatttgtatggcaatcagtgtcggaacattgtttgacggctttgattgcctttgttgcgtaaaacaagaaccaaaatatccgatgttttgttcttaatatcataaatagattcaaaatggttatgaaaaagattttaatagctttggccttgttgctgactggcattgcaagcggatcggcatgtaccggtatttcgttcctggccgaagatggtggatatgtgcaggcacgtaccatagagtgggggaatagttaccttccgagtgagtatgttgttgttcccagaggacaagaattggtatcttatactccaacgggtgtaaatggcttgagatttcgggctaaatatggtatggtaggactggctatcattcagaaagactttgtggctgaaggactgaatgaagtaggactttcggctggattgttttattttcctcattatgggaagtatgaagaatatgatgaggctcaaaatgcaactactttgtcggatttgcaggtggtgaactggatgctttcccagtttgctactatagacgaagtgaaagcagctatagaaggggtgaaggtggtgtctcttgataaacctggtaaaagttctacggtacattggcgcattggcgatgctaaaggaaatcaagtggtattggagtttgtggatggtgttcctcatttttatgaaaacagggtaggagtactcaccaattctcccgattttccatggcaggtgactaacttgaataattatgtaaatttgtatccgggggctgtcactccacagcaatggggtggggtgactattttcccttttggcgcaggtgctggattccatggcattccgggggatgtgactcctccatcccgttttgttcgtgtagcgttttataaggcaacagcttcggcgtgccctacagcgtatgacgctatattacaaagttttcatattctgaataattttgatattcctgtcggtatagaacatgcgtcaggaaaagcacctgatattcccagtgctacacaatggacttcggctattgatttgacaaacaggaaagtgtattataaaacggcatataataacaatattcgttgtattaatatgaagaagattgattttgataaagtgaagtatcagtcgtatccattggataaggagttgaaacaacctatagaagagattattgtgaaatagtgtgggggggaagctgttgacggaagtacatggaaattttaatcgcaatgaatgaaaaatggataaaatgtatttttttagaaaaaagttctagaaatgtttgcaaatacaaaaataaaccatacctttgcactcgcaattcggaagaatagcaataacaaaggattgattcgctagctcagcaggtagagcacaacacttttaatgttggggtcttgggttcgagccccaagcggatcaccaagaagctggacaaaaccagacaaagaaaagacaactcctacaatatcaaggtattgtaggagttttttctttgtataaagtccgtgaccgaagacacggaaaggtcacaaaaagacatacttttgtgaccaattcgtgacctgtccgacctttcagattttaggtcacggaatgtctgaaattggcggtttgttgtcttgatttgtccgtactgcaaatatctcattttcagtttatcaatttaattttgtaactaaaaaaagagattatgagaagtactttcaagttactctatttcgtcaagcgaaatgcagtaaagaagaacggcaacgcaccgattatcgcacgtatcactatcgaccaagttgtagcccagttcaataccaagctggaaataaatccggttcactggagcgtgaagttaggcaaggcttccggaagaaccacagaagccgtacacatcaattccatgctggagagtattcgcagcacggtacaccaacattaccatgcgttaatgacgcaggacggatatgtgacggcagaactggtaaagaacgcctttttaggtaagattgcaagggagcggactttaatagagttctttaagcagcacaatgaacaatacttggagaaagtaaagatgaataccacagacaagacctattcacgttacgaactgacaaagaaacggcttgttgagttcatgaagttcaagtattctatttccgatatactgattaaagacattaatgtggtgttcatagaggactttttgctgtatatcaaaaacagctacgggtgcagccacaatacggcgatgaagttcgtacaacgctttcgcacggtggtaaactttgccaagaatacgggtttagtgactgccgaccctttcggtagttatcgagtaaggtttgagcgtaccgatagagattatctgactatggaagaaattaccaccatttacaaccatgagtttagttctaaacggctggagcaggtacgtgatttgtttattttcagttgttatacggcactttcctacattgatgtatgcgagttaaggcaggaggacattcgtaccggatttgacggaaatttgtggattgtacgcaaaaggcacaaaaccaatgttacatctaccgtccgattactggatatacccaaagccatattggagaaatacaaagaccagttaccgaacggtaagattttacccattatcagcaatcagaaaatgaatgattacttgaaagaaatcgcagccatctgtggcattgaaaagactttgacctaccatgttgcccggcattcgtgtgccacttcggtgttgctcgcaaacggtgttcccattgaaacggtatctaagattttaggtcataccaacatcaggactactcaaatctatgcgaggattactgatttgaaggtaagcagtgacatggaaatgttggctcaaaagttggacattccacaccggactgccagtcgttgaaatcgtgttatcgccagataacagcaaggtgtgatttgtggcacacaaatctgttttccgtgccgcaaaacaccttgggcaaattcactccgaagtcgtgttgccaattaaagaaagatattcactaactaaagattttcgctcgtcgggacgggtggtcccgccccttgccgctgggcgttccccgaccgatgagtttattttgcaatcctgcaatcttgttttattgaaatattgatggctggattgattgaaagcaagatttcaatatggcaggttggattgaatgaaaacaatataacactggcgaaaagaaaaatagaaacctgtcatttactatcatcttcatccattcgtttgactaagctttcttgcaaacggctaagatatgccgtccggtctttcttccgttctttcatggcaatataggcagcataataatcgcctaactccacttggaacaccgtaccgaggaagttcatcatttcttttatttccacgttcccattgttaatgtcacccgaagaaacaagggaataccccaattctattaaaaagacttttttacccgtgaaacgaaaaggatatttcagacacttttgcaggttgtcttctacttgggtattggtttccagttttaccagtcttttgttcagatagatacgcagcatttcattggctattattttagccaccttataatcatatccggttgagaaattcgggtctttatcgaattgtgcgctatcggtacataggcgtaaatcagactttccacggacaaaataatattcatcatacaatattgaatgagagcgataatattggtaaaagtccagattacggttaaagaagtaggtcaagttatccagttcccgactaatataccctttaataacttcatcgcttccattagggcattgtgtttcaatcctgtatatcttatagaaaaatagcagccgcccaagtatttccggtttttgtaccttgaaaaataatatttcatcctcttttgttggaaatacataggtttgtattttcgttcttaaatcactaagaacagtttgcaatctatgtaccattgaaagagaagtttcgataatatcatagccgtagaggtcgatttcgtcaatctctaagtctatttcagataatatgtcacaaatcttctctttcatgtagtagttatttatagagatacaatactatcccgatatagtcttaattcatcttcaccagcattttttatggcagaatccaattcattgagtattctaactttatcattgggtatcattccaacaaatgggactgtatttgataccgtatttcccaacagggttgtttctatacaaagatttgaaatgaatgtccttagttccaataacctttcatgttcggttgcttctacaaaatttccacattgtatttcctgatataattctgattcaggaaatacggtcaatgatacaaaatttatggtaaacgggtgtagttggttaaagacattagctgtattaacagcattttgttctcctttatttcttcctgcaagacctgtcaggtacacgaaattgtatctgatatttgcttcttccagttttttacattgctcaataatatcattggctgtatatcccttattcatcatagccaatgtattatcatcgcccgactctgttccgatactgatactgtcgaaacctaaatgacgcaggttttgtaattcttctacggttttcgatttaatatctgaaattcgggaaaacataccaatgctttcacaatagcgaagatatttcctgattagaagacctaaatctaatagtctgttatagcttaaagcaaaaggattagctccggttaaaaatactcgccgtgcccttggttgatagtcttgtatcactttcaaatcttcctctacctctgcaataggagatagacgaaactttgttccgtgatataagctacaaaatttgcacttgctatgtgtgcatccggctgtaacctgtaatagttgagaacttgcctcgtaaggcggtcgccacacttgtcctgtaaaatgtaatagttccatataattatcaattaagcacttggaatcggttattttccttatttttgtgttgcgaagttaggacgttctttttgaataaagaagaactatactatctgtcagccacttacgtttgggttagtttttctcaatatcaatgattttaagaacgaaaaaaatgcgaaaaaagttagattatgaatactgttctgcatcccctatattggaatggttaggcgacaagtgggctttagttgtcttgttgaagctacacgagaatggggtaatacgtttcaatgaactatataaaacaatcccctctatatcggaaaaaatgctctctaccgttttgcgttcattggtaacggacggattagtgagtagaaaaatatacccttcagtgccacccaaagtggaatattatgtatctgaatttggaaaaaccttaatccctcatttggaacatctaaagcaatgggggcaagaaaactttgaaacgataatggataacaggaggaaaaacaagtattaaaatttagtgcaaggtgcaagtatatatctatatatatagcttgcaccttgcactaaccttagaatgtttattctcaacggtttgcataatccaaaaataatgcgtacatttgaacccaagatgttggcagacagacaccggacaacagcagacagtttttaaggactaaagcgtgacggatgcaaagccgaaatttctgaaagcactgatattgaggaagaaataacgcttggttcataacccaagcggatcactagaaggtcagggagttatatcaaagtaattctctgattttatgtttattacgctagtttacctgctccatgtaaacatgtagatgttaattgggggggcagtagaaatgaagtgtggatagggattttccccgtccatacctttctttagatttatacacacatacagagttgtgtgaaaggagccgacaagagcttttcaataagtttaatctttccgttaccatgaaatccaagggacagagattcttaaaaaagtaacaaccccaccggcggaataaaatgaatgcatatcacattccattcttatagcctaagtcttttctttctccagattaaacctttttatacggatactttctatctccataagctttggagttaactccaaagcttatggagataactccaaagacttgtggagataaaacaaacaggaaaaaagaccttaaccatacggcaggaaaggtttagggatacgaataagatctttttagggcgagtctgattccaaagtctcttacacattccttacggataaaaagtcccattaaaattcaactcctccctaattgtttccgtcaaatggtttcgtggttgcctctcccttttgggatatgcctttgcggctgataacgcatttgagtgttttgtaaaatatcatcatgtctgtcatgaagcaaacatggtctacgtaccagatatccagttcgaatttctttttccagctgattgcgtttcttccatttacttgtgcccatccagtgatgccggggcgcacttcatgtcttcttgcttgctcttcattgtatagaggcaggtattgtaccaataatggacgggggccgatcagagccatgtctcctttcaatacgttgaaaagttgaggcagttcgtcaacggaggtggcacggactattttccctatgggggtcattcgtaagctgtcgggtaaaaagtttccgcgacagtctttccggtcattcatggttttaaacttgatgatcctgaatatttttccgttctttcccggacgttcctgaaggaaaaaaatgccgctacccctgttggctatggcaagtaacaagatggttgacaataggacaggagaggtcaataatatcagaaaggcggctataagacagtccagcggatatttgaaataacgggtatatctgctcttcttcatggttgtggattattttttataatccggcacggtgaaccacaggctgtcactccgtcaggtatgtctttgcacactactgatcctgatccgataatggtccatttgcctattttaactccggggttgatcactgctccggcacctatccatgagccttcccccacttccacattgccacataatgtggcgtgtggcgagacatgtacatagtcttccaatatacattcatgatcaatagcggcgccagtgttgacaatgcaatgtttacctgtttggcagcaactttgcaatatacttccttgcatgacaacactgccttctcctatttttgtatagggggagacaatggcatggatagagatgaccgtaccgaatacagcgttttttttatacaattgttccgctatattttttcggatgctgttgtttccgatactgataagtatcgggaacattcgttttggatcgtaggaaagaacatgatattccatccattcctgtatgtggggattatcatctatgatgcccgtcagttcagtgctgttttctttcagtatatccatgatcactttggcgtgtccgccggctccgtataaatacatattgtcagtctttattttgttagatttgaaatctgttcttgatagacctttcgtaaggcttcccatagcgtccggcggtcgtatttttgaacaatctgtgggcgggcagccgaggccaattgttctacgagccgtggagaagagagaaatccgcacatggtgcgatataggtattcgctgtcatgaggaggaataatgataccgttctttccgttttcaatgatttcgttacatccgttgatgttcgttacgatgcaaggtaatcccatcgctccggcttgtaatattacattggggaatccttcccggtaactggggaatacgaaggcatccgcagcggctaaaaaagggcggatatcctcttgccatcccataaattttatggcgggatgtttgtgtatatgttctgctgtttcaggagttaccggatccagttccgcttcaaagtctcccactaggcaaagacgacagtttgtaaattcctgttgtaggcggacaaaagctgaaaccagttcgttgatacctttatcccgcaccaatcgtccgacgaagcaaaaagtgaaacaggggttccggcgatagatttccgcttgtctcattacctccggtgtccggtcaaaataagcaaggtcaattccgttgatgttaccgtttccgataagatgcaatgcccggctggtgatatggaaacgttccagatctctcctcacacctttcccttccggattgaggtaggtcgcacaggcacaagtgagtttgtctgtagcaattaataactgctgtttccaacctgtagttgaagggaatactagtcctgtgaaagtgtggatccggatgggaaccctgcatattcgggcagccatcatggccaacagccccgccttgggtgtcagcgagtggactatctgcggtttttctttgcggaacaggatgatgagcctgatcagtgcaatcaagtctttcaaaggggcaatgtggcgctccatcgggatagcgcaagttctgacgccttctctttccgctactttgtgtaattcctctccggacgaagagacagctaatacttcataagtttctgccaacatcttcaactgtccttgcagcaggagatggagcgaaaggggaacggtggatatgcgtattactttgggtttcatacagatggtttgtgtcgtaaacgataataaagataccccacccattcgtgcgttagttctggccaggaagccaagacgtgccaagatggcaggaaattcgttttttccccctttatttcgggaaacgtatcggtgatatatgtgtccggattcagccccgctgcatggaaggtccatagcgacctgcgcatgtgggtcgcggaggtaatcagcagggtcgattccgttttcatactgttaccgatcagctctaacgtgaacgttgcgttttcccacgtgttgtttgcgcgggtttccaagatgacatcttccaacggcatgcccaaatctgccagatattgtttcatgtccgcggcatttccttgcaaaccttttccgtctttgctttcgatgatcgaaccgtctgaagctaacaccagtttccggatgcgtccatgcttgtacagccggatgccttctaataaccggtcggcaatctcgctaaattcgggtcggcttcgtttccagtcccaatagctgtagccgcccagcacgatgccgtatgtatattgtttcctttcaggtagggggcggtcatattccttgtaccattgttcggcaatccattgatagagtgcaccgttggagaataagagaaaaagcaaggctgacaaagtgagacagagccttttccatcgtttagattttaggaccacccctaagagaagaaaaataacgatataggttgttggattgatagcaagtgaaataaacatgagattttttatatatgtataagaatgaatgaaattatttttttaagtaatctaattggaatttcttttttaacttgtttcttacatagatcatatcgcatgttggaatcgtaggcggcaattgcttttataaaaggatcttctaaaaatgcaggatgattttgtacttgcatgatatccttgtatatagggtcctttaactcttccgagattctgttttttatttctttaggagacctgactttaaaagctatcatttggcaaatatctgattttagcacatttttcagttctattcggatataatcagaaaccttatgatattgatatttgtcaattaaagccttttttatgtaataaagttttttcaaatcaggcaacaaacaggtgttatatcgagttgtcataccaccgaatcgatagttatatccacattctttgagtatgtaaattttagataaatatggaaataattggagattaaaggcaaggtcttcccctgtagtgatacctgttggctgtatattggctgcatttaatgaagattttcgatagagttttccccacatattaacggataaaatgttgattccaaaaaaagaaatatagtatttgttaaatagttttggttgttgtattagtccgttaacaggactgagtcccgtttttttaccaccccatagcgatccatgactcgttgcattcccatttccacatagtctactccagttttttctgccgtttcgtatattgttgtaagtatttttttttattcaccagccagtcatccgaatatattgtgctatgtattgttcggtgttgcaaattgggatgataattgaaatcatggttatatgaatgtattaatttatttccaaatattaaaataaaacgtaaacgcatagaacgttaacagcgcgtagcccaacatcttttcatggttcacccaaaaacgttccttcatgaacggataaatcaacaccaccggcatgatgaaccacgaaatctgggcgaaacggttggaataggcggcacggatcaccagcacccagaaagcgttggtgacgaggaacgtattatatatccaatggtaatattcgtccttgaagttgcggcggaagatgaaatagtaacccactgctacccccatggcactatataacagaaagtcccagcggaaagtcatactcatctggacgatctcgcccaccatgttgtcacctgtcagatagccggaaaagcggttgtctccccccattagatttgttgccgccaaatatgcttggatacgtccgcctacggcatacgatacgcctacacatgccccccatcctgccagataccaatagctgtttttgatgaaccaggtcagtgtgcctgctccaaccatcagataaatggatttgtggattccggctgccaacacgcataacccgatcattacaggtggacggttgacatacgtcattgccaagatgaacaaggaggctcccatgccattccggatgccatttactccgtaactccagaaagtaaacatgctgagtatgactaaaaaaggaatatagtaatactctttgaagatacgttgcatggccagccacaatgaaccgatatagacagtggcacataacagaaaaaaagtatggatgtcgctgtatttggcaaaccattgcataaggttgtgaaacaaccattcgccttcccattgccaggaaaagggatcgcatgaattggctgcagtataaaatcctttggcgtagtttaccgtgtctccgaaataaacgctgacaggacgtagccccatatacaagatcaggattagtgtaaataatacgccccacatggcgttgagcgacacggtctcttttttcaatacgcttcctgtgtggcactgccatacggctgtcagtaccatgcacaatacggtgacatcgaaataatgggcatattcacttacggggataaagtctatcatatttatggatgttttttcgttatgttatttttttcgtgcttttgtctcgcacagtttcatgaatccgctgtacaggggcggaatgtaatagaaactgaggagtgaaagttttatatgaaaggggatatgtctgtttttcaggaactcgttggctgtttgcttttttagtcttttcgctgtaaggtgtgccagatgccggtaaggcgtgtttgacgcatgatacctcacgttgattatcatcttgaaaagcttttccaaacaacatccccggtaaactgtattttcttttggaatgttttgcaagcagagatagtaggaatcggcacggtctatgtaacggggatttaccttttgatgtgtgatactcgtaggtcgttgtacccagtagtacatggggatatctattatgacagcttgacaagatttttgatagatccggcagttgaactcagtatcttctgtaccggtctcttggaaaaactcattatccaacaactcccgtttataaagtttgttccatactacttgcgcttgaacttcttttattccttgctgtgggtggatatggttgaataaactttttatcattatttcttgtgtaagaatgctttttgtgtaagcggaaggaattgaataagatttgtcattgtcatatacctgttttcctaaaatcatggaaaagctataattaccttcctgtaatgcttccaacagcacttcatacatttgcggatggatataatcatcaccgtcaatgaaagagatgtattttcctttggcagctttcatcccgctatttctagccggagacaatcctgcgtttttctgatgaatcacttcaatgcgggtgtctttccgggtatattcatcgcaaatttctccggaatggtcggtggaaccgtcattcactaatatgatttgcaaggttgtataagttgatgccaatatgctttcgatgcatgggcggagataggcttctacattaaaaataggaacgatgacgcttattaaatccgtttctatatcttttttcattttcttttttcgttgataagctgattaaataattccatccacatagggatgatattttttatatcatactgttctgctttcaaacgggcggcttttcccatttccttacgaagttctttatcctctatcaaccggcagattctgtcagccaataccttctcgttataacgggtacgagaaatccatcatgcccgtcggctatgatgtcctgcggtccgcaggggcaagcgtatgagacgacaggaactccacaagacatggcttcgatgataaccaatgggagaccttcaaaaagcgaagttaatgtgaaaattgacgcttcatataatggggaaaatatatcataagtatatccttttaagaaaatattgtttgtcaattgattgtttcttatttgttcttccaattcagttcttaattctccttcaccccatatttctaaagtccagtcagcatgcctttctattacatacttccatgcggaaattaacgagctgaaatttttaggaaatgccaatcttcctacagcaattacttttttatttattaatgaagcttttttcgaaccaaatgaaataataggattaggaatgacacacacatccacttctgtattttttccccaatggacaactttatcttcttttgtaagtaccaccgttcggtcatattttttaaggtgtatgcgataatcaatgaagtctcccaaaatggcaaggagtttgtcgaatacactttgggcatgtaatgacctgtaatttttattgctatgtatctctctgataaaaaccggatgggagctgaccgacaggtaaggtaaaaagtttttctcacttgttccggtagatatgacaatatccggctgtatttggttcagtatctctttcaaccgttttttatgttgtttccttttatagataatacctttcaatatataaaaacgggatttccagtcatcttcaaaataatttatgtcacaatttaccaaatgtaccttagtggaaagggggaatactggtttgtctttattgtcggtcacaataatccaaacctcattctttagagctaatttatttgctttggctattgtgactctttgaatccctcctgcatagcaaatactatctgtacaatatgctattttcatcgttctataataaattttataagtttcaataggcacaagactcctgtggtagaccggaatcgtgccatttcaaaaaatagcctccagtgtatcggaaaatagttcatcggtaactgccggatacttgtcctatattcatgtgaactcaaaattgcggacaatgcaccgtgttgtttcatgaagctgaccggtgaaaaggtgatgttcaatccttgtcctatcaggcttaatgcccggcgatatgttaaagccttttcaaggtcttcccggtgtaagggagttatccattcttctattaaccggaataacaggttccactgttcagtcagatggggtttatacagtttggttagcgaggtgatgttgttttttcgataatggtagaacaagtcaggcagatagatggctttttttacccaagtgaaataatacacattgaagagtaagtcctctgtaccgatttgtctgacaggaacaaaccgaaggccatgttctttgatgagtgatgtcttatatagttttccccaagctgtagacaaactgtctatctttccgggcaaacgcaattcttgatcgttaggagctataagtcgcgcatagagccagtggattgaagatccttgataaaccatctttttgtcgctgaacagatattgaggaaaggactggttggcaaattcacgaatgtaagagaaaagacagacatccgtttgtttgtcggtgtgtgaaagaagtgttttgcagcagtctgttcctatccagtcatcgctgtccacaaacatcacccattctccacgggcactctccagacctttgttacgagcgcctgatagtcctaggttctcctgatggataacaaggatccggctgtccctttccgcgtatgctttcagaatatccggtgaattatccgtcgatccgtcatttacacaaataatctcaatgtcccgataagtctggttcactaacgaatccagacattggggcaggtaaggggctgtattataaaccggtacaatgatactgatcatgataattttcgtgctttataccgtatatatccataccaggttattcccggaagcaaagcggatagggtcagccatttgcgtggtgactccgatagaaaatggggatttcgtgccaacaaactgtctgccacatagtgcatcgcttcgatgaaacgtcgttgtgaggtaggagccagttgcatggaacttttgcggataaaagcaaagcctcgcgggttacgtatgtattggcggtacatgttcaagcttgaaccgtcggggcggtattctacgtttaccaacacttcgttcaaggccagtaaagggtaatcctgatctatcaattggtatttataaccgagtgatacatatttctctccttcaaaaatgggatattcgggatattgtttgatgacatccgtgcgatacaccagttttttgtctccccgcccgccttgtgcatagaatccgcctaaagtagtccgcctgcattcataaggaaaaggcgtaccgattaaatttccttggaaatcagcatccagtccgatgattcctgctacttcttttgaaccgtgtgcgttccagaatgtgataatcttctccactgcatcatcgggcatataatcatccgagtcgacgcaagtgttcaactctgtgtcgatcaaccgataagccgtattgtgtgcagcatgcattccttggttctcctgataatggtagcggatgtctattttcctctctgctatccatttttccacccattcaagggtatcgtcggtcgaaccgtcatccacaatcagccagatgaaatctttgcaggtctgccgtgacagggcttcgtaacctaaatgcagagtataggcacggttatatgtcggcgtgaagatggtcagcgtcttcttatctgtttctatcttgttttgttccattgtcctaaataataattctgaagccattcggcgtttttcacaatgtcgtaaccggcatcggctatttgttggtaataaccagtgcgtcggcttgccatacagcgcactctctctatttcgcatgcccattgtcgaggagctgtttccaatgagaggaaggagacttggtcggtcaaagccgcttcgcggggaatgcgatcggacacaacgcagggcaggccggcacattgcgcctcaaccatagaaacggaaaggccttccataaaagaggggaacaaaaacagatccatcgcttgcaacaggcggtttacatccggacgtccccccaacaaatgtacttggtctgtcaaacggaactgttgtacctttttttgaatggctttttgcaattcccccgtaccaaccagcagcaggtgtgctgtgggattaaactcctgcacatatttatgaaacacctccaagaggaactcatggttcttctgtcggttgaaacgtccgacgtgtcccacgaccgtaacatctttggacaagtgaagttcttgacgaacctccagccgcaccgcttcatcaaacctgtataggaacgtgtcgatggcattgcgttgcaaaatcgcttttttccccaactcgtttccaaacaaccatcgggcggcttctttcccacaggtaaacccttgggtcaggtaagggcgcatggtatgcttgaaataggtgcggaaaagccatttagtatcgaataaagcgtgtgcgttgtgtgcgtgcgcaataattacgggtactcttcgccctgctgcttcccggtaaacgaaatatcccgattccgaacaatgcccatggataatccgatactccggatgttggtcgaaaaagtcggaaatttgttttctgtatgtattgaaggtgaacggatggagggggatcatacggtagatcttgccacccattgcctctatttcatcatcgtatgcgccccgttcctgccggtgtaccatgaaatcaaactgaacccggttgcggtctatgtgacggtagtagttcatgaccatcgtttcggcacctccccggttcatgatggtgaaaagcatcaatattctgataggttcttccattgtgacatttatttcattcgatttcctgtcagccgatgcatccattggctgagcttgtttatccatcggcttcgtttgatccatgtctggctataccaatggatggaatatgtattttcggtgcggtgtaactgcccgtcgatgtaatcatacggacagaaataatccgtaggatagagagtgatgtctccgagctgctgaaaactgccgtcctttctgaatccgtaaaccttttccagtttgcgggtcagctcttctacgttggtggtctggtccggtttcccatccggggtgatgaaacagcgatgatcgtatgactttaataattcaatgaagaaagagtgggagggttctgctcctatcaggttcgttcctacccattgagttccttcgaatcctaaaaaggccttattcgtcagtaacctatccaagggacgtaccaattctacatccgtgtccatatagacacctccttcgtgtaccaatgcccacaaacgtgccacatcgctcacaaaagcccatttcttggtagcgtatgcctcttcgcaatagcggttcagacggatgtcgaagttattttcgttccactcctttatttcgtaaccgggacaatgtttctgccagttcgctatcatgcggagtacttcagcaggcttttccttatctccaaaccaacaatagtgtattgttctcgggatcatgtgtttcctctttttatccttctattgctgaataaattttaccgacttctttttcgttcccataatggcggattcgtagttgtgccttgatggcttcttgttgtcgtttgtcggcaatgaactgtgccaatccttcagccgctccttccacattgtttgggatgataatgccgtccaccccttcttccagttggcttgaggaggtaggaaaacgggtaatgaccaccggttttcccaatatctgcgcttcacgcaccgttactgctttgccttcgtaacgcgaaggctgtacataaatgtcacatgccttgatgtaagggtagggattcatttgcttgccagccaaaacgaaatgtttttccatccccgtttccgcaatcgctttccgtatcaacggtttatctccgccataccctacgacataccaacaaacgtcaatgccctgttgcaccaattgacggcagatgtacactgcccggtcgatggctttaggataagagaaccgtcctacggtacagagcagaacaggatgttttgtttgtccttctcgtccttcgaatgcttgtaggaaagaagtgtcgaagggcagttccgcctgttcacgtataaaagtttcggacaggatattttccatcagtatcaacttgcattctaatgaagggaattttgaaagaaaacctttggaaaccgattcagaaatggagatgatgcggccgaaagctccccataccggcaattcccggcgggtattgatgtcaataaaggaatagtcggtatgaatccatgcccatttttgctgtgcctttactttgtcgcgcacaatgttgtgcggtgtaaggaaactgatggccaggtcatacgtccggccttcgttgatggagggcaggaatggagtagtacagtctgctacatattgaaatatggcctgactttcttttgccttcctccgtttcctgtaacaccagtccaaaaggtgtgctgcgatgcgcccggcagcaatgtcccaatacccttcgcggataattttccggatagggcgggtgagggtggtgtacttttttacttcgggcagaagattcacttccttgggtatgaggttcataaattccccgctatgccggtagacaaacagatccacttggcaacgcgaatagtctagggcattgagcaagccgatcagcgagcgttctgccccgcctatctccaggtattggatggcgatgaaaatacggggaggcgttgtgccatgtttgattggctgtctattttgatgtgatgactgatttttcatctttctctattaataatgtagagtgtgcattgatcacctctggatggtttcggcggatatatccccctatactgttgtatgtcaatcccagccgggtggcaatgtctttcagtgtttcggtggtcgtcccatacaggcggatcgcttcagcatatttttctttgctttgtctggacatccgtttcccctcagaggtctgtaccataccctgtcggtttgccaactccggttcatgtttgtgcaggtactctctgaatgtctcgggatggagcccgaactctttggcggcgtgggctatcgggcgggggtgttttctcaggcttccgatggctttctcgtatttggcggctacggttttcatccgctttttcgatttccgcaaatcaagacccccttctgccttgccggaaagtcctgcccgttccctcactaagtcgatatgccatttgtgcagataagaacgaagtccttccgctgtgacgtgtgttctttctgcgatttcttttagcgtgagagccgtgtccttataaagagacaaggctttcgcatatttatcttctgtacggagagagggtttgtaggtccttccgttgccggatagttcgcctctcttcttctctggtctggcctgtgcttccgaacgtttctttctcttttgttccagtatatttttgtgatagaacctcagatgctgtttgaaaccgcttggtgagacatggcatgccccggctatttcagggatcgtcatgtctgtctttttataaagctccactgcttcggcgtattgtttggtgcaagccggggtcgccccacgatgggtgttgtcatttatgcccaaccagtggcgtactttctcgcgccaaggaatgacttccggttcatggatgcgcatgaagttggctagtcccgttccctccactccatgtttgcgggctatctgcgacacattcaattcgatatcctccagagacaagcatgcatctatagcctttttatatctggcatgcgacaccacattgggctttccctcggacatgatcttgacggcatggggattttctccttccaaaggtatgcgatggcggtgtaataccaattcgcgccagtagcggcgcaagtaactgccgagtcctcccgctgagacgtgacattccgtagctatcgttttcagtggcatgtctgtctccgcataaagggcaacagccttgtcgtatttctgatgaagcgcgtggcgccgcagcagagcggatcgctgtctcggagtcaatcctataggatccggaaacggattttctttttccagttgtcccattggattcgcttgttcattgctttgctggggattcctcaccggctcctttgtgggataatctctgtctttcatctcttggtggaattgaatagccataccttttccctcattagtataagagctttagtggaaaagacaataaaaatgctctgctaaaaaggaacatatcttcgtagggcaagtaatatatcttacttggccgagtaagatacttaacttggtccacgaacatatcttactttggttcacgtaggaaacatgaattttcctcctcgactatcatcgctccgaaccttcgtgaaggtacttgttcctgtatgtataggagcataatgtccctaataccataaagactacagaaggcttgtgtaagctgtttaatatatagtgggcctcaataaattgacatttattatactcttttttctggtgtaaatatcttgttgtattcataacaaaccaatcgtgtaaatttgaacttcatggccagatagaataagtattctttccatgaaggataaatgttgcgaaaacctataatacggaaggaatctcgtatcatagtcattgataaaatttgttgaatgccctgcttcttgtccggttgattagaattattatatagattgttgaaaagcatcggcaaataacgcaggatgattttttcagacaagtcagttgttatggggatgtaatgttcaatattgtattttctgataagtcttttcttttcatcaaccaatttttgtagattgtttgttaaatagggcttataacgcagcctcatcaaactacctgcattattgatacgatattgatataatgcctttggaatcattatgattgaagacgcctgtaggacgcattcataattaaaaactgtatcttctccgacatgcaggtttttaatgaaccttatttttttattgataagaaaattacgtttgaatacaaacctccaagtataacataaatcgttattcatttctattcttggattcttttgaataaagtccataggttgcatggcatggtatggtttgaaattcggtatgtgtatctgatgagtggggaatgtagaataaccacataaagccaaatcggtttttttatcctcaatagcatgaattaattcggcatatagattattttccactttatcatctggatcgaaaaaagcaatatattttcctttagcatattttatgccgatgtttcgagtggcacttggacctttgttttctgattgacgaataaattgtattctgttgtcctttgcctggtattctttcagaatgtcgggcgatgagtcagatgaacaatcgtcaacacaaatcacttctatgtcttgaacttcttgcctaagtatggaatccaatccttctcgtagataagttgcaacattatatacaggtacgatgatacttaaaaccggcatataatttcttttttatatttttcatcatggatgtcgcccactcctacacctgcatcggcttcattgacatatttgcttggaatgggtactttgtggctcgctcccattctgtaccactcgtattcgatgtcgatatgaccgatgtcaatggcttggtatcctttttgggcaaggttgtaagccatgactgtggcagtagggcctaaagccagaagaatgagatattcattaggagaatatttctgaactattttcataatggcatcatagtgatcaaaggcgtttgtattgggtgctaatatccgtcgaatagatttgacattgtcaaacaaatcattaccgacacctaatcgacttttttcgccttcaatgagcagaatgtctttgtctgcccagatttgttgtatgagtttaaaataaaaggcacactgtgttttgtcggcaaacatcatgtaacaacggctgatgaaagcattatgaaatattcttttacgattgatatacttgtaccacgatttcctgtaaaatgccaaatgaagtttccagtggttgcgcgcttctatattgtagaggcttaagtctgtaaatatatccggcaggcatacgatgtgattggaaataggtaccgacagtacctcttgcattttttgttgtagtaacggttgttgggtttggaaagcgagtgcctttccattagctatctttatttcgccatctcctaaacggctgaccgaacaatgcgattggatgatgtatcggatggtttcttcaatggatacaacgtgaggagctattacaacttttcgatatggaatatccataaagagatagagtgaatttcgaactgtcaagtaacagtcgaataaacaattccaaatgtcaaccaatagttttttcatatatatctaatgttttagataaatacagtcccattccttgtgcaaaaggcattcgatcaaatatttgtgaataagaaccaatgcctttggtatctccctgtgcaaaatctatcgtgccatctcgacgggtagccttcataagtgctttttcaatttttattgcggcattcaagtaacgttcatcaccagacactcggtacgcatgaacgaacaacaatccaaacaaggcgctgcccgaagattcaaatcgttcgttaggattgaataccaaacaactgaatcctccatctgctttctgaaaaggcagcagatggttactcaagtttagtattcgtttcttgtttccaggtaaatcggcagtttcgataagtcctaagacataccatccccatccgcgtgcccaatcaaatactcccaagggcttatgtgaggctaagtcgtatgcatgtgggggaaatacttcttcccataagcaatgatcgtattcttcaatttgtcggatggctaaatcactgaaatcgcattggtgtaaaaagggacaaaccaatccgatggtatcgacaaagcgaatgtgaggtaatgttttccgataaggtatagtctgttcagtttgttgataagatataaagtgttctttaatctctttttctgtttccatataaagtgcatctttcttttttaagacatacgccaatagcgattggtctatctgccaattttcttttatgaatagcgaggggtggcgtttgacatactcttgggcgtcctgttcgggcaaggataaaaggagtccggcatcctgccagctttgtatggtggtggaacgatagttcccttttagcatatcccaaaggactaaccgatcttgatccgtaatctgtacggtagggcttttgtatagccattggcgtgcctttttttcaacagcttgctgccatgctttgcggtctgtccatctaccaatgtggatgcgactttgccatttgtatagttcaatagtccaatcaacggaaaagaatataagggctattgtccctattaaggtgagtatgtaaaccattagaatcataatgtttgaagcaattgtccggcttggaatgtcttggataagtatcccggcatgaatgtacggtagtgttttctaatctcgtcctcgtgtgtttgcaaccattgaaatgctttgagcaggtcgtttccctgttgcagagactgcacgggcaagacataatgctcttcgttaccaaacaggtcgcgggctatgccacgtgcctttaccgaataacccatcaccaaagtaggtatttgagtggagtaggctgcaatggaagcgtgtgtgcgtgaggctaccaaaaaacggcaacgggagatgaaaccttttagttcctcggcgttatgatcttcgataagaacgacacgaccggtccctttgaattcgttgtagaggaattgcaatgggatccgatcgtcgttatagttccatactacatgaggaatcaatgcaatttgcatatccgtggtggcaataatataacgaattaattgtcgatagttcagaagtgtcatccctttcgccttttcgtgttttataatcataggactgacgttaatgcctaccgtattaccttctgcaaaaccctcgggtaaagtaaggtctgtacggttaagctgaaaagccggatcaggaaagagagagagttgttgtatccctttttctttcatggcttcatacgtgatgctttcacgggcaaagatatgggtgtaggaacgtaaatcattcagtatatcgccttttagaacttccggctcaacggaacatccccacaagatagtctttatcccttgttttcgaagctgtttgttgaccaaataaatgaaaacaggcactccgtagcaataattgtccccaccgatagacaaagcataactatctgagttggcttcttgaaaaatagagcgaaaactggtacggtcgaacgcttctttgtctccgaagcgataacgtataaaggctttccagtacgccaaactgagatgagacattggtgcttgtgctgcccgaagagtacagatggcgtccagaccgtatcttttgtcttcatccgggttgctggaaaatagagtagctgtcggtatcatttttagtgtcgaacgtacaatagcttcacatccgtggttgccactacctccgtgaggatataataaaagtttcatcttttggcaatgattgaaaaataaatatagaatataggatataaccgatacagaatggactgcttgatccaattgctgcacgaaaagcattgtgtaaaatctttcaatttttttatttccggtatcgcaagaatagttcgtagataagagatttttttattttgcagacgtggatagagaaaaattccatcgtatagaataccccacagtcgtttgtacagataagtctgagccgttgatgaccataaatgatgtctttgataaaaagactgtaatatcttccattgttgatagtctgtatcaaattgtttgggacgaaacttactagataaggttccgctacctaatatgcgataatgataatgactttcgtttatgcacgcaatggtgtgtgcatattccaaatattggtagttgaataaaaggtcttcaccgtatgaaacttgtgggtcaaacaaaatttgatgatgctgtatgatgttgtttttgtatagtttcacaattggtccgtacaataagttctgttcattcagcattacaaaatagtttgtatgattgcagcctaactcgaaatttagtgactgttgaggtatataatctatgcaattcccgtctttgaattcctgagtcaatccacatattatcaaatcagtttctttctctttcaaattgtttatcattgccgaaagataatcaacatctacccagtcatcgctatcaataaaacagatatattctccctttgcttgttccaatcctttgtttcgagcggatgatactcctccattgggttgatggacaattataatccggttatctttttctgcccattggtcacatatttcactactaccatccgtagaaccatcatccactaagatacattcaaaatctgtatagctttgttggataaccgattgaatacaattgtctaagtagagttttacgttatatacaggtattatgatagaaatcatcgtacgaatccgatagaatgagttttttgttctttttactacaatttctcgtagactttttgttctaaattctttagagcaaattgtctacctttttcttgagatttttgtttgtaatgcattaagcaggtattacttgacaatagggttttaagtccttcgtatagcgatgtgccattgttgtcaacgataagtccaaactcaccattttctcctaataattcttgcataccagcacagcgagttgtaataatgggcaagcctaaaattaatgcttctgtgattactgtactatatccttctgcccgcgatgaacagacaaataaatcggcttttgccaagtaaggataggggttggtgtgaaatccgcttagtcggacacatgtttctaaatggtgttgcttgatgtactgttccaatttttccctgtcggttccttctcccaaaatatttagtgagaaacgaaaaccttcgtcttttaatcttttgatgataggaagcaatcggtcgtaacctttttgtggtactaatcttcccatagtgaccattatcaatccttgttctaaccagcaaattggattgatagatttgtctgctagtagttttattttgttttcatcaataggattgtaagtgactgtgctgttgggatgggaaaacaataggtcgaaacttgtttttacatccaaagagacagaagtaacctcgtcgaattgttgataggactcttgttcttcttgacagcttctgtatgctatagttgtccaatgattgttttttaaatcagtatgtacccaagcgatctttttagatcgcttgttgttagatccagaaacgattcgggtggcatatccttcaataaaggctacttcggtgtcgtaattccctttgacaaaaagagcgtaaaacaatttggcagaaaagtgatgatagattaggtgtttgaatttattaatgatctttttagttattcgtctccagcaattgtcttggtcgctaattggatggaagatgtagttgtaatgaatttgctcgggatactcttttgttacatcatctttggtcagactatataatgtaatgttgaacaatgtataatcaatatgagttaatagcgtcagcagaatttgttcagctcctccaccataaagtccgttagtaaagaaaaggatcttttttttcatcgagttaataatgtttcaattggtttcatcaatacttccaaagtaaattccttccctcgtttgattaccttctctttgtaatgtgacaattgctctggatggtcgagtagttgtttaataccttcaaacaaggtcgcttccgaattctctgtaatgatgccatacttttctccttgcagaagttcattcataccggagcaatcagtggtcacaaccggaagccccaaaataagtgcttcagttaccgcagtactatacccttcgctgattgaagaacagacaaacaagtcggattgtgtcataaaggcgtatggatttgtttggaatccccatagagtaacacaatcttccaactgttttttgcagatataatgttgaagcatttcacgttcttcaccatctcccaatatccatagttcgaaagcgtatccggattgcttcaaacgtaaagcgatgtggagcaaccggctgtatgctttaactttggtcagtctgccaatgctgattaatcgtattttgcttttggaaggcaaaggttcgtattgctttcctttttttataatgtcttcgtgatctatagggttataaatgatttttactaaactttttactaaagggaaagcttttataaaggctttttggacagtaacagaaactgtgacaatttggtgatatcggctatatgtctgttcttcattctgtttattcttaaatataacattagtccaatgatgtttttcaaaatcagtgtgtacccaagcgatctttttggcctgtttattagtagaatgtgccaatagtttagttgcaaatccttccacaaaagcgatctccacgtctgcatgatgtggaacaaaccatttgtaaaccaatcgtaacggaagccacgaatagattaatttgtatttgagttgataaatcagtttccttattccttttatttgttctggattgggcaatatagaagtatagtgaacgtatggctttacatcgtttacatatttcccgcaatctacgatgcaacatagtgtgacatcaaatttgttcgagtcgagatgttgcaacaaggtggtcaataccttttctgccccaccgccagatagggattcgatgaggaaaagaagattatttaatttgctttgcataagaatttaatatgaacttgtaaagacataataatttctttttccaattccaaatgttgactggaatacaatttaatatttggatagattgatgaatatttaatgctgctgaaaaataagtatacaaatcaaaatcaagtctttgttgtattatttgctcatcttgttgtttcatggggaattcatcaataatccattgataatactttaaagcagctttggatttttctacattccaacatgagcttgaagaaatgttattttcactttttctataaactattaggctttcttctgttgatgcaattccattgttgttgcagaaaagtaagatggaagcatcatcagcataataacctgccggataaatttgataccctcctaattgttgaatatgttgtgtcctataaaaaaattccgatattgtatgttttctttttccaataatagtatttgaaaggaaatcagcaaatgtttcatatttaggaaacaagggagattttcctatgtttgtattggttttactgtcaataaggagcgttcttgttttaaagacattgcattgtggatggcttttaactaaaccaagcatcgttgcaatgaaattcggtagcataatgtcatcatcgcatagtagtacaaaaaaatcaccattagcataggaaagacatttgttccaatttaggacaatggaggttttccctaaattgtcctcatttttatagtatctgatacgtttgtcgttatatgtagaaataatttcctctatgttctcaggagatttgtcattgactatgatcagttcgaactttgtgtaagtttgatttaaaacagagtcaatggcttcttttaaatatgtagctttgtatgcaggtattccaatcgatacgagatcttttgtcattttttataatttgaaataagtgtgagaaatttgtatcttcaatatggtttcctttttaatctttccttaattatgaattcatatgtccaatctcccaaaagtatagatggttgaagtttattccatttattataaaaactcagcgacatgaaaaatactatattgtgaattaggatattgtgacttttttatctttctattagttgaaaaacgattaataaatgaacgttcataactgaaagaatgattttttgtcgtatctttaattctttaattagttgtatagtgttatcttgagatcgatcatcgcaaataattatttcatctataggtaatgtttgatttagaataaattctaattgtttttttatatatttttcatcattaataggtgcaaagtgcgacagataatttcatgctgatttaatatgttttaatttctttcaaccaattttctctgataagagaagacttaatgggaatatcttctgcaaatacattaccgaagcaatcttccccttgaagtacattgaatgtcaattgcgacttttttgttgtgtagcactttacatttctttccgccacatcaaaaacaattttatattctccattggatagggtgtaaggaggaatctcgaaagtaaagtggtaacttcccggttctagcgatgtctttttgttctcatcattgtagtcggctcgtgccagtgggtattggaagatgctatatagattaaatccaataaccaaagaaggaatatgtttctttacgcatatttcaaattctattttaatagtagaagaattgtagaatatgtttccatcgctggatgaaacagaggcttttttcaaatagagtatttgtttgtttccgtcagttccttcaaatgagttttgaatgatttcatcactttgataagtacggatggtatcggatatgcttcccatatatttaaccttcccattttccaataatactccacgtgaacatagccgttgcatactacccatattatgactcacaaacaacaccgtcctcccttcgcctttcgacacgtcctgcatcttgccgatagctttcttctggaattcggcatcacctacggcaagtacctcatctactaccagtatttccggttccagaaaagcggctacggcaaagcccagacggacggtcatgccgctggaatagcgttttacgggggtatctacatagcgtttcacaccggcaaagtcgactatctcgtccaacttgtgggagatttcgtggcgagtcatgcccatgatggagccgttcatgtagatgttctcacggccggtcagttccggatggaaaccggtaccgacttccaagagagaggcaatgcggccacgggcacggatggctccggtggtaggggaggtgacacgcgacagaagtttcaacaaggtggacttcccggcaccgttttttccgataatgcctactacatcgccttgatgcacatcgaaggtgatgtctttcaacgcccagacatattccgacgcgcctttcttgctgcggtcgttggtttcgcctatcttcagataggggtcttcctggcggagaatggtcgttttccaccagcggttgaggtcgtggctcagtgtgccggtgccgaccagaccgagtttgtagagtttgcccacatggtcaaaccggattgctatatcgttcattcttattctctttttttaattctgctgcttacactgtatccataaaattgcgttccacccggctgaagatgactactgagcagaacagggtggagagcataaacaaagtgctatatgccaatccgccccaatcaagtgaaccacaccccatgcagctgtatttaaaggtctcgaatatgggggtcaacgggttgagcgcgatgatgtcacggtatttttccggagctgcgtttagcggataaatgaccggagtggcatacatgaacagttgcaggccgaaggtgaccaactgggtgaggtcacggtatttggtggtcagcgccgatacgatcaacccccacgacatggcatggaatgcaatcagaaatgtcaggaacggaaacaacagcagggcggcattgacatgcagtgaagctcctttcacataaaaatagagatacatggcaatgaacaacaacaattgtattccgaacttgattaggttggaggtgatgccggacaacggcacgaccagacgggggaagtagactttgccgaacacgcccgcattagccgtgaacacattggaggatacgttgaacgcggaactgaaataattccacagcatgatacctgccatgtagaataaaggctgtggtactccgtccgtcgagatacctgccaggccaccgaatatgaacatatacatcacggtagtgaagatcggttggatgaggaaccagagaggacccagaatagtttgtttgtacacggtgacaatgtcgcgtttcacgtacatatagtataggtcacggtaccgccatatacctttcagatctatatccagccattttttctttggctttatttctattgtccagttttctttagtcattttttgaaatcttgttttttagtagcgtttgtccagatagagcacacagtgctgctgtttgtggtcgctccagggattggaaaccagttggtaacaattcacttggaatgcaggtgaacagagcgtataatctattcgtaaaaaatcgccccagcgttggtagctgcctttccatgtccggccggcctggaggaagcaatcctgcagtgaccggctgattttccggtaaacatacgaagccggtgtatcgttgaaatcaccgcacacgatgaccggataaggactctcggcaatggcgtttgccaagagatcggcttgccggttacgccggatggcgtggtggcgcatcgtctggagtctgtctttcattgaggatgattcattcatgccggtagtttgcagatggacgttgaataaccggaaagtttgccctatcatccggatatccgcttgaagcatcttattgtagctgtccgggaagtagtactcttgaacgtttccgacaggccagcggctgaagacggccagattaagaatttcatcctcccgcgagttgacgatgcaataggggtaatcgggaaaagcagctcggatggtgtcccatgccagaagattggtatggggacgttcctgcaggcagacgatgccgggctgcaggatacgaatgctatggatggccttcgccagggtgtctttgttcagtctgaacccttcggcattccagcaaaccagttttagctgattggaatctggcacttcttctctatgtaggaaatgaagcggaaagtaaccggatagaataggtgaactacctaatagcaaaagcaagtaaagcatccaccaacgattatgtttccaaagcagaatcgcgaaaataatcccatcggctatacatataggaatcgccgatagactgatgaagataagatttccggcccactcgggagtgaagcaggggagaaatatcaacagcagtgtcagaccgcacaggatacctcccgacagacagttaaatacgcgcattgttagcaatcagaccttctaaagcttcgagttgtcttcgggtcaacctcaattggtcaagcatgggccggtaacgctccaaatggtgcaggtccgtacccacaaaatcgtacattttttgttttaacagcttttcgctgaccactttggggtgcgggccatagtaaccgctcagtgacatcagattgagttgaaagctgtaacctttctctttcagcagaaggtaatctttttcttccatgtacaggtaacgctccgggtgggcgatgaccggttgataaccggcattccatactttcatcaggatatccggcaaaccgggaggagggtacatgtaggatgtctcgaccagcaggtggctgctgcccaaaggcagcacttctccatccagcttgtttgtaaaagcggcatccatcatatattcggaagacagccgtagatccaacgggccggaataggccgccttcaacacgtcgagctgttgtcgcagcttcttgttcggtgtgggataatcttccatgatatggggggtgagccacactttccgcaaccctatggattccatatagcgcagcagggatagactggcatttatgtcgggcgaaccgtcgtccactcccggaagaacatgggaatggacatcggtcatacccttcattaaaccagaattaatcaaattgtatttggacttgaatataccaaacatcctacttcttttttggggggattttaggatttctttctgaacagccgtttccagcatgattcggaaccatccacataaccatagccgtagccgtaaccatatccatagcctccgtatccgcctgtctttactatggccccgttaagtaccaacgacatgttgttcagttgtccgctgcgataaattttttccacttccggtaacatgcggcggtccagtttgccaacccgtaccacgaagatggtcaggtcggctatgcggttggtgatggcggcatcggccaccactcctacaggcacattgtcgacaaagatatagtcataacggttgcgcagttcggttatcagtacttccagttgttcgctgagcaatagctctgacgggttgggggcgatgggaccggccggaatgaaatccagattttcacagatctcgttgtgcttgatgatttcatccgttgtggccttgcctgccagaaaagaggtcattcctttttcctttgtgtggaggcgggtatgtgaagtcaaagtccctttacggatatccatgtcaatcaggatgaccttcttgtcggtttgcgcgaagctggctgccagattgctggatacgtatgtcttgccggcacccggtccgaacgagctgaaagtgacgacttgcatgttctttgacttgacacgcataaaatccatgttggtgcgtattatgcggaaggcttccgatacaatgtcacgcccttgggcacggacagcaatgccatgtgccgtttctttattctctgttttccctttggatgaatccttgggtatttcgcccaggaaaggaacggttacagcatcctcgatgtccttgcggttgcgtatacgggtatcgaagaacaggaacaatagcaggacaatggccggcagggcgattcctttcatgacacctgccatgatcatgctgcgtccgttgggagaaatcggagcatcccctcctccagcaggatcgagcacacgggcgtcagtttcggtggtggcctggctcagcgcattttcttcgcgtttgttcagtagatagaggtaaagttcctctttgatgcgttgctgacgttcgatagaaagcatttgctgctgttgtctaggtatgttggttacccgccactgggcttctccggccctgcttcgtgcctcgttcagtttcacatcgatgctgacaatcatattgtcgatggcccggatgatattctgccgcatggcaatcagattcttgttcagttcctggacgatgggattcttgtcgctgcttccttctatcagtttgtctcgtttcaacttgttggcattataggccgttatctgggtttcaatgttgatgtcggctatgccggtgtttgaagggataagctcggtttctttggacgggtccaccaggtagctcttgatgtagcgtgccatgcgtgcctgtaattccagttcctgagtggtcgagctgtactgccgtttgtctgacatggacatggaagcggctgaaccgatatcgatgatgtcattgttctgtttgtaggactgaagttcgttttccacgcctcccagttctttttcgatgatgactagacgctcgttgatgaagctggaggtattgatggctatctggttcttgtctttgatagtctcttcattatacactgtaatcagcatattgagcacatcttcggcacgggcggtggagtaatcacggagtgacaggtagaggatggaggcgtcattctcagcttggctgatgttcaggttgcttctgaataggctggccattgtgtccgtactctgccggcgtatcgtaatcggtgtgttgaaccacttgtctgtataatataaggtgggtgagaccactatttttcctacgggcgactggatagtgtcacccagattggccgtcagcgttatacttgtggcgtctgtcgagaaatcggataaccggacttgcttcctgttcaggattctgactgtcaggctgaaatcaagatgatcctcttcttccgggaatgaaaccttgacaggggcttgcgtataaagttcctcctcacgcaagtcatccatgatgaggtagcatacattggcgtgaagacggttcaccacatcgcgcatgagtttgtgtgactggaattgcaggatctcattggatacattggtatatgaataggtgttaaaacggtccagcccgcgaccgatgttgtttgaataggcgtcctttatcatgacggtggctgaccgtgaatagataaagggaagtttggcatattgataccatgcatatccgccgaacagactgaccgacaatacaaaccagtaccatttggacaacaggtacatgatgatgtcaacggggttgatattgaatcctcccccgcttaaggtcttatctcccgacatatctttttgttcactcattcttatcatgtcgtttcttttttatttagtagttaacaacaccagtgaggtgattgtggtgatgaaggacaggatcatactccacgtgctcagttttctctgggcctgttcggtggccttcatgttggtgggttctacgtaaacgatgtcattctgttgcaggtaatagtaaggcgatgtgaagatgtctttactgcggatgtcgtggaacaggattcgtcgcttgttcccatattcgcggatgacggcgatacggtccagacgggatcggggggtcaggtctccggccatggcaagagcctccagaagagtgatgcggtcgcctttcacttcaaaggttcctacatgtccaacttctcccagcacggaaaatttgaagttaaggaaattgacggtgaccataggatctttcagcaattcttcgttgatcagtcgtttcttgatcagttcggttaattgtcggcgggtcagtccttccacatgcagttgtcccagcacaggaaagtctatattcccgttgatatccactaaataacctttttctttttcatcacttaatacccccacttcattgttggaaatgcttccgtctgcttctacagaatagcttctgcttccggacatattgaaaggcagggacagttctgggtttttgctgttcacaataatactcaatctgtcatccctatggatgatggcttcatatttttgaaccataggatattcctgtagttcatccatatcttgtaaatagacaaaatctttgcgtgaagcgcacgaactaaaaatgattattgccaacagacaggccagtttgattgttttatccattgttttataattaattgttttttattcctttatatgaatcacttggtcacatcgttccatcagtcgtgaatcgtgtgtcacaaatattaatgtgttattctttccccattgcaacaaattgtccatgaggtgtgtggtggtctcggtgtcaagtgccgatgatgcttcatcaaacagccagatccgcccgggacgcaacagtgcgcgggctattgcaatccgttgggcttgtccttcagacaagccatatccatgttcccctatcttggtatctagtccttccggcagactgaacacaaattcagcgcaggccagccggatgactttatgcagagcctcttcgtctgctcccggactacccagccataaattctcccggatggtaccgctcagcaacgtatttccttggggcacatagacgaagttgatgcgtaaatcgggggtcacactgagtgtccgtccgtcatcagttgtcaaatcgatgcgtcccttttccggataaaccaaagccagtatcagccggataatggtcgtttttcctgttccggtaggtccggctatggcggtggaacttcccggatgaaaggcagctgtaaaccggtcgagtaccggctgtccctcttcatagccaaaagacactttccgaaagttcagtgtcagtggttggtctatgtagaccgggtgttcgtccggttctacatcttcaaagagggccattaaccgttccacggaggtccatccccgtatcagactgggagggatggatattaaccctaaaaaaggtccctgtacctgtccgaccagttgaagaaaggctgtcattgttccgaatgttatctcgtggttatgcagttggaaaataccccaaaggaatgcacataagtaccctcctccaaatgtaaatcccatgaccccttgcgtaaaagtggaaaatttgatttgttccattcccaatttgaacaacttctcttgtgtttcatgtaatttctgtttccggtagttggtggctccgagcgagcggactagaatccgtttggacagattttcttgcatgacggtacccatctcgctgttcatctttttttgggcacagctcagttcccggacctttctgaaataaatctttgacaataaaacaagaggggtgactcccagtatgaaccaagctaaacgcgcgtcaagaatccacaagtagataaaagagcttgccaattgcaagccggtaaccagcaggttgggtagaatgcccattcccattcccaacacttcggaagcgtcactgctgatacgggtcagcaggtcgcctgtgtgccatttccctgctcctttccatgaacacatcattagggcgtcggacagcgaattttgcatgcggatactgatgcgcatgttgatcttgccaaaaatccagggagatacaagttttatccccatacccagcaggaaggataaggctactattgtggctaccaggtaaatattcccttcctgtgctccggtagctacatcgatgatccatttggacatggccacattgaccaatgacatgaccactccgaaaatacccgaaaagatagagaaggtgatgagccaatggtatccttctgttacctgcataacccatttgaaagctttccatcctaactgacatgtattgctcagattctcccgtgtgagcttctgcaaaatttttttcagcaattctttcatttcttttttatcatttccttgaaacgtaagagggctaatccggccagccaccagaaagtttcgtcgaaagcataacctaacgataagtgcattttgtgaaagatccgcttcaacgtgtatcgtttgttcgcccatttcccggtgggacgttcaccgtaacgttcgtctccatgtccaaaattgccactttcccaaatctcttgcattaacttgtccggacagagactggtactgaatggtaaaaggtcggccggcacgccaagatattttatcaatagggcataaagtaaccggttccaccggtgaatgtgccatttgcgacagatacactctaattcgtttttgtttgtaacagaatgtaatgcgttaaaagccatggctatatcacacaattgtcgtagtccgatcccttcattgataagatgcttcaatatgtgggtggaaagtaatagatgattcgcttcgctcggaagtttgccttggctgttggtaaagacccccgcttcccattggcggatttctttttggaggaaagggttgtgcaactctatcagcctgctgtgatgttcaatcagaactctgtttatcagacaggaagcctcaccattggttcctctttttaccggtaatcctaatttttccatccgttggttggcttgttcggtttgtgtcttgtttccgaaccacaggtcgatgtctccggctatgcgatgttccggatgagggtagaagtcagctgtccctatcccttttagcagcaggaaagggatagaaggtgattgtacataaatctgttggagggctttaatcgtttcccggtgttgccggttcacccgttccaaggtgtcaacttccaccatccagccaagcaataccttccggggaggtacggcttcagtcggcaacaggcggatgccatcgtaaataatgccttgtacggtttgttttcttgccatgctgtgaatttcattccattccttttcatctagaggaaaaagggcggaacagtcttcctgccggtcccacagtccttgccttagcaaaagcatgaaagccttttgtaatggggctgagatcatctttttgtcttattctatggctaacccagtttctaaccattgtcggcacagctcgttggcatcgtttcgggctgtatctttatttacttcatattcattgcacagcagtgctccggcttcatctaccgtgaattccttgttttccaattgtttccataaccaggcggctgtttcattcaaggaatagacctgtgccatatccatggtttcagaaaacggattgacaatcatatattctccacctacttggcgaagaattaaattagaattgagtctcattgtctttatattattgcattatcctatttatagttaaaattacatcgaccttcacaggcagatgtaatggggaataaaatgtaagttcattctattatccgctgataacatagggtcttgaacttacctgatctaacattttttacagatccggcgcttctcgcgaagaaaacgaatctctcttctaacatttcttattgtattgtttgtcatatctgaattgaacagattactgtttaccagtttatacctgtgggacggatcatgccggcttgcagcagttgcatgataaatcctgcggcatcttgcgatgcggtgtctttatccacttcgtattcctccagaatcaacagtactagatggttgaagctttctgcttcttcgatatgctcccagataaattctccggtttcggtcagggtgaccattccgttgaactctcgggcggtctgtccggaaggaaccagtacgatttctccggctatgtttcgtttgataaattctttggttcttttcatcttttgaaaaaacgatatgttttaatgatggtcctgcgtaaaggaattatgttcggccatatgtgggcgaagaatttccactggaaatcttctggaactatccatttcccttttcgcttcaccttgataatgatggcgaaaatctgttctctttgaattggaccttcgatgacagtctgggcgtcaccgataagataatattcttcatttttaacattataaatacggtgcatgacatattcaccgttgcttcgctgatagaacaccatatctcctttccgaagttcaccggaggggcttttcaggcagatgtggtctcttgcgtggatcaggaatggagccatgctgctgcccgagatgatcatgctcacctgctttccttcctcaatgagggtacgcagcatggatatgtattctttcgtatcgacagtcttcataatggggcgtatttcacattatcggataatttccagtttggtcagatacctgtgcagggtgaaggctgcttccggattcatgttgcacgcataggtgctgatgcttgtctgtctggtcaaaacctgcagatcgtcgagtgctttgccggtgagctttggattccaccagttgattgtaacctgcgagcagagagctttgaaatgcttcatggctgtctggggacggatggtgttatcagatgcctgttcgatgaatacaatggcctccaacgggcggcgttcattgtgacagataccgctggaaccgcatacaggccatcccgttatctcgtagtcgccgtttggaagtggacagagcagggcacggtcgccattgagtacctgggtgccgggaatatgccggcaccacaggttggcatgcgtcgatttgccaatgccgctaggaccactgaataagatggcttgcccacgataatccagaaaagtacaatgtagtatgtaacatccctggacagataaaggacgttccaggcacaggcaggaaatgaacagggtatctgtttgcagttctcttttcagaccttcgatgaaatagatgttggcatctctttcgtttctttcctgatagagagcatagcaggcattcaggtttcctacagccagcaggcgtgtttcttgttcttccttccggaaaactacgatgtcgttgcgttggaatgtgatctgccagtcgttggacggcaaaggcagacggttgacaaaatagaatgtatagtaccggtccgcttctttggtagcgggtttatggtcgagaaacaaacggctgttaacaggaatctcctgttctgtcactcctgacaattcaatcgttagcgggccgatattcagtctcacaatcttcagtttttaatgtattacggggggataattcgtaatgatccgttctttggctttcgccatctggcaaagatagtccatgcttccggtgattgttttttcacagtgtgcggcggcatagcatacgttgcatacgggacgaaggtggcaaccctcgcattcggtatgggataccagttccttggcttcttctaaaagttgttgccatgcagttgtcatcggaatctttttcaggtcaacggccggttgatccagcatcacacagggggtgaggatgccttgccagttgatccagcatgaactcttggcagctctgcactccaaagagcaggctcgtgttccttccacatgggcaagcgtatatttcaagtcgtgcatgtatcgtgccatgtcattcccttttttgtactccatatattgcatctcgatgcgggccgcctcgtcggcatccagtctttcagttagaatgttacgcagacttccgcattcggggcgtgagagaggaaacatgtatgagtttacttctgccggaatgtccagatgctgggccagacggatgatctcgtcgtaatctttttcattctttcgtacgatacttacgttcagtttcacatcaatgtctgcctttttcaaccgtttcagggcttccatgcacagggtgtatccttgcggattgtggcacaagcgtccgtaagtttctctgctgtctccatacagggtgacgtttatccgccgcggcttgtgggtctgcaagatgcgtaccatttcgttgtcgatgagtgtgccgttcgtattgagagtcaggatgaatcccatttcgcgcagccgggtgtacagctccttgaagtgtggatagagcatcggttcacctccggtgagaaggatgaagagtgtacccatgtcttgaagttgttctgcccagtcgagccattgttgcaaaggcgacaaacctccgtgccgttccaccacgctgcgttcggtgcgtatgaagcacatgtcgcagttgagcgtacaggtgggagtcagctcgaagttggtagtgatcgggacacggctctgattggctttgtccaccaatgcccgttccaaaaggttggcatcgtgaagatgatccataacttggaatgtatatgtatttatgagaaaagtctttatagacttcctttcatttgtttctttttactttttgcaatgcggcaaaggtagccgatgccgccgcattgctctttttcattgcgggcattggcatagcagacatcacagatagagcgtaaggtacaacctgcgcattctttatggaacggaagttgttcgcatttggttactatttgtttccaggcatcgcttacggttgtggaaagtagcgaaacggctggtgtttccatatcgacgcacggagtcatgacgccctgccagttgatccatgcggaacttttacctgcccggcaggcaagtccgatgccttcagcaggtacgggagattctccacgttccaattgctggaggacatgagtggcgtatgatgtgtattccttgccatatttatgttccagtgcctcaacctcggcatgtgccacttcatccggtacggggcggcacgtatcaaggggtagcgtggtggcgcatcccggccgtgaatagactgaaatgtaactgttggtcagcataggtaagtcccattcgtcagctagttccagcatttgccggtgttcttttatattttgtcgtgtcaaggtgaggttcagtttggtatctatgccatattcttttaatcgtttcagtccttccaggcaacggtcgaaaccgtttgtcgcgtggcacagattgagataagttccgttggtcacaccatataacgagacattcaccctccggggtttcaaacgttgaaacagacgtactgtttcgtcatctatcaaagtcgcgtttgtattgatggtgaggatgaatcctttttctttcagccggatatataattctttgaaatcaggatagagtaggggctcgcctcctgtcagtaagatgaagagcgttcctatttcctgtagctggtcggcaatgtgcagccattcctctatgctccgtaatcctcctcttttctcggcttgtgacttctccatgcggatatagcacatatcacaacggaaattgcacgtcggtgtcaattcaatagtggcattgatcggagtacggtttgccgtcgctttgttcaccaatgcccgttccacagggtttatgtcttgcagggattccactaggataatgattttttttcaaagaaaagtttttgagtctagtgtattggatttcatttacttccgtggtcgtatatgttaccgaaatttgtctcgatggaaaatatatagattatcttccctttttgaagctcaacaaaagttaatacttaatttagagcatatcctttttataaggcaccagaattggcatctcacaaaaagatattatcaaattcgattgatttttaactattggcatacaaccaagtctatattttacgatgatagacccaaagatagggaaagtagaatctttcaaggtcttcattgctttgcataattcgtaaattttgattcgcagcgaagatagatattttagaaccctaatttgagaggtttacagtatagactttacttttaaggtccaagtctatactgttatttgatgcgaatttcataaataggggaatgtcttaagagtggttaggacgacctggtatttcttcaacagcagatctgatttcaccccaaccttgatgattgtattctccagtgttatttactgtatcatagctagtccacttgatgcctctaatcttgtcacctacttttgcgtcacttaaatcgaatccattccaatcaatattgagaataggtataccccatttttctatagtcccttcgtgccctgtagcatggataccattaatatctacataggttgtagcgcatggttctccatgattgtttgtattgttttctccataatgacaatgaaatagtgctttaaagttatagcatgcagctacatattcgttcggaatgaactcttcgctaataagcatcggtttttgataatctttcttcatactatttttttcttttttgattcctgtttcggaggaaaggaaatcagaaaaggtttgaagcgaaatagtgattgggtcccggagaaactccggtgtgaaagaattttgaaataattgatatattgcgatttaccatctacaatatgatcctttcattttccttttcattacactaattctttgcagctcaaacgatattctgacttagttcctccagtagtctgatcatatattatttaatctctatttctattaatgagaatcaataaatttatctaagcgttaggaatcaagattgaaataaatgaataagattgctatttactgttttatttaccgattaggatttagcagtttcccaagaatttatgtcaaggttcttggtggcgtgaccctcccagcccttttgtcctctccaaacaatgactaattcacttttctcaaatatctgattatggttgtaatcaacatatccccaataaaaaccagattgggcttcggcttcatgaaatgcactacatggatgatagtttcctagccaaatacctcgatttcctatagtgggttgtgaaccagaagcaggcttatctctaaaataatacaacgttcctcttggtgcatcacaagtaaacttataaacagttccactatctccacaagcagccacatgcgtttgcggcacgaaagcctcgcttttcagctccggctttgtataaactttctttgtcatcttttttttcttgttttgccagacttcttattctgtaagagggcaaaagtttgaaaagagaaaaacatgaccgagttctgcaagaact

SEQ ID NO: 14406 - DNA, 13404 bp, Unknown
  gut microbiota DNA sequence
attatccctttgttcgcctatagcgtcacttgtttagatgtagaaaatgcaaatggaagaatgtttgtaacattactgtcagatgattatgttttcttaacaaaacttcgtgcagtattatggtatagcctgcatttctttcaatagaaaagacttataaactagaataattaactaataaagaaaagcacaatgaaaaagttttttggttttaataaattgcttgcgtctgtagcggtacttgcttctgtgataatctttcaatcctgtttggatgatgatgataatgattattacagatacgcgtggcccaatgcattggttactgtgaaaccggtggccgacaattcattttttatgcagttggatgacagtacgacactgttgcctgtcaatatgaaaaattctccttatggtgagaaggaagtaagggctcttgtaaatttcgatccggtgaatgagtcaagcggagagtatgacaaggctgtacatatcaactggatagacagtatcttgacaaaaccgattgccggtgatttaggagataagaatgatgaagtgtatggtactgaccctgtagatatgattaacgattgggtgacaattgccgaggacggttatttgactttgcgtttcagaaccatgtggggggatcgcagtcaagctcattttgtcaatttgctgatgagtaaagatgctgaaaatccttatgaggtagaattccgccataatgcctttggtgatgtatacggtgaacctgccgacggactggtggcatttaatttggattctttgcctgacactgaaggaaaaacagtgaagctgaaattaaaatggaaatcatttaacggagagaaaacagcggaatttgattattgtacccgtaagtcaactcctgcaaacaatgcagccattacagccggacgaagtgtcttgagattaaaataaggttttataactgaggtgcaatttcaatccctcctgttctatgtggtatagagccggagggatatttattttgctctattcgctcatccatatccctagcattactccgaggatacccaataccacactgctaatgatgtatgtgaaaaaagaggggtagagtcctgatttcagtaattgcaaactttcgttgctgaaagtggagaaagtggtgaagccaccacaaagtccgatagtgagcatcagtcttatatcattgttgatatgaatgcgtgaggtgagggtataaaataccccgataagtatgcaacccaaaatattgactgcgaaagtaccccacggaaaattcgttgctccctggcgataaatacttatggtaagcaggtagcgaagtacacttcctgtacctcctcccaagaagatgagtaatagtgatttcataaatgctacattttgatgcaaaaatagcaatgattattcattcagagccaaacttttttagtaattttgcaccctaaacgaaaaatacgcaaaaaggaatgggtggtttttttggaacagtctcaaaggctgaatgcgtcaccgacttattttacgggacggactataattcacatttaggaacaaaaagaggtggtttggctacgtatgctcaaggagagggctttatgcgctctatccacaatttggagagctcttatttccgtacgaagtttgaatctgaacttccaaagttcaaagggagttcgggtatcggcattatcagtgatacggacccgcagcctatcgtgataaactcgcatctaggcaagttcgccatcgtcacagtagctaaaatcaataacattacggaattggaatgcgacttgttggcggctaatatgcacttttctgaaatgagtcttggcaagacgaaccagacagaactgatagcattgcttattgtgcaaggaaaaaattttgtagatggtatcgagaatgtttttaataaaatcaaaggatcatgctccatgctgatattgacggaagatggtattatagcagcacgtgacaaatgggggcgtactccgattgtaataggtaaaaaagagggtgcgtatgctgcgacaagtgaatcaagcagtttgccgaatctggattatgaaatagagaaatatgtaggaccgggcgaaattattcgcttgcgtgccgatggaatggaacaaatgcgcaagccgaacgaaggaatgcagatttgttcttttttgtgggtatattatggatttccggtttcatgttatgaaggaaaaaatgtagaggaagtacgttttatgagtggttataaaatggggcagaaggacgattcggaagttgattgtgcctgcggtattcctgattcgggggtaggtatggcattggggtatgctgaaggtaaaggaattccttatcatcgtgctattgccaagtacacacctacctggcctcgtagtttcactcctgccaatcaggaaatgcgttcactggtagcaaaaatgaagctgatacctaatcgcgcaatgctggaaggtaagcgcgtgttgttttgtgacgattctatagtgcgtgggacccagcttcgtgataatgtgaaaattttatttgattatggtgctaaagaggttcatatgcgcattgcttgtccgccattgatttatggatgtcctttcattggtttcacttcttcaaaaagtgatttggaactgattacccgccggatgattaaggagattgaaggcgatgaaaataagaatctggaaaaatatgcaacaacagattcgccggaatataagaagatggtacaaatgattgccgaccgctttggtctgagttcgttgaagttcaatactttggaaactttggtagaagcgataggattaccaaaatgtaaggtatgtacccattgttttgatggctccagttgcttctaataacaaaataataaaatattaataaaaaagagctgtgatttgtttggcaattcacggctctttttctatttttacaggcaagtatgaatattaaaacaaaaagaaaaatgacggtaatagaacgatttttaaaatatgtaagcttcgacactcagtctgatgagaatagcggagttacccctagtacgccgaagcagatggtgtttgcgcaatatttaaaatcagaattggaacaattgggttttcaggaaatttctttggatgagaatggttatctgtttgctacatggccggccaatacggataaaccggttcctgccatcggatttattgcacacatggataccagtcccgatatgacgggtgcaggagtcaccccacgcattgtctatggttatgatgggacagatattgtattgtgtgaagaagacaacgttatactttctcccaagcaatttcccgaattgttggatcataaaggggaggatcttattgtaactaacggcaagacattgttgggagctgatgataaggcgggcattgctgaaattatctcagctatggtatatctgaaagaacatcctgaaatcaagcatggaaaaattcgtgtgggatttaatcctgatgaagaaataggcttgggtgcacataaatttgatgtggagagattcggatgcgagtgggcatatacgatggatggtggtgaagtaggggagttggagtttgaaaactttaatgccgcttctgcaaaagtgattattaaaggacgtaacgtacatccgggatacgctaaggataaaatgatcaactctttgcgtgtagctaatgagtttgtggctttactgcctacggacgaagtgcctgagtgtactgatggttatcagggattctatcatttgattggcatgacgggtgaagtagagcagactactatctcttatataatccgtgatcatgaccgtgccaagtttgaggcatgcaaggaaaatatgaaaaaatgggcggaaatcatcaataagaaatatggagaaggtaccgttaccttggaactgaaagatcagtattacaatatgcgtgagaaaattgagccggtgatgcatatcattgatgtcgctttcaaggctatggaagaggcgggcgtgacacctaaggtgaaggctatccgcggcggaacggatggcgcacaactttcattcaaaggattgccttgtcccaatatttttgccggtggcttgaattttcatggcagatatgagttcgtgccaatccagtctattgagaaagctatgaaagtagtggtgaaaattgctgagttggtggcaagataagtaatttattaaccttaaaatagtaaagtaataacatgaaaacaactccgtttaccgaaacacacattgccttgggggcgaaaatgcacgaatttgcaggttataatatgcctattgaatattcgggaattattgatgaacaccttacagtatgtaatgccgtaggtgtttttgacgtatcccatatgggtgaattttgggtaaaaggtcttaatgcgttggagtttttgcagcaagtgacttcaaacaatgtagcaactttgcctgtcggtaaagcgcaatatacttgtttccctaatgaggagggaggtattgttgatgacctgttggtatatcactatgaatccgaaaaatacttgttggtggtaaatgcagccaatattgagaaagactggaactggtgtgtcagtcataacacagtgagtgcggaattggaaaatgcatccgaccatatggcacagcttgctattcagggaccgaaggctatggaagttttgcaaaaactgactccggtcgacttgtccgaaattccttattatgcttttaccacaggtgagttcgccggtcagaaagatgtgattatttcgaataccggttataccggtgcaggtggtttcgagctttatttttatcccgaagccggtcaggctatctggaaagcaatttttgaagcaggtgctcctgaagggattaaacctatcggactaggggctcgtgatacattacgtttggaaatgggcttttgcctgtatggtaatgatttgagtgataccacttctccgttggaagcaggattgggctggattactaagtttgttgaaggaaagaatttcatttcacgcgctttacttgaaaagcagaaagccgaaggattgaaacgcaagctgattgcttttgaaatggtagaccgtggtattccccgtcatggttatgaactggtaaatgctgatggagagaaaataggtgaagtaactagtggtaccatgtctccaatgcgtaagattggtattggtatgggatatgttcagaccgcttacacagcattaggtactgaaatatttattgatgtgcgcggacgcaaactgaaagctgtaatagtaaaggccccgttcagaaaataaatcgaaagccggaaaagagaacgctgataacaaatataacgcgaatattcagattttttgaatattcgcgtttttctttatatggctgatatacatttgttgttagttcctttccataaaaacagcttttgatgcaaaattaataataggatgaagaatatgataaatagataattcttaattttgcaatcaaaaatttattagctatgtctgaattggctccattgataagtgatttggctttgattctgatctgcgccggtgtcatgacgctcgtctttaaacggttaaagcaacctcttgttctcggctatatcgtagccggctttttggcaagtccccatgttcctcttactccgtcggtcattgatgtggccaatatccatacatggtcggagattggtgtgatatttttgttgttcgctctgggattggaatttagtttcaagaaattggtgaaagtaggagggacagcggtcattgcggcgtgtaccattatattttgtatgatattggttggaatttttgtggggtggtctttcgggtggcaacgcatggactgtctgtatttgggaggtatgttggccatgtcctctacgactattatttacaaagcttttgatgatttggggttgaggcagcaacggtttgccggtttggttcttagtattttgatattggaagatatattggctattgttttgatggttatgttgagtacaatggcagtgagtcagaatttcgagggtagtgaaatggtctatagcattgctaaattattattcttccttatattatggtttgtggtaggtatttatatcattcctacatttttgaagcgttcccgcaagtggatggcaaatgaaacattgctgattgtttcgctggcattgtgtttcggtatggtagttgtagcggccaaggttggattttcggctgcgtttggagcttttataatggggtctattttggcagaaacggtggaggccgaaaatatagagaagcttgtggcccctgtaaaagatttgtttggagccattttctttgtatctgtgggaatgatggtagaccctgccatgattgtagaatatatatggcccattgtgattattacattggccattctgcttgggcaggttatttttggtacaggtggcgtgattttgtcgggacagccgttgaaagttgccatgcaatgtggtttcagtctgacccagattggtgaatttgcattcattatcgcttcattgggggtaagtctgaaagtaaccagtgatttcttgtatcctattgtggtggctgtttcggtcattaccacatttctgaccccgtatatgatacgtttggcgatacctgcttatcatatagtagagaaacgtctgcccggcaaatggagaaaaatgcttgagcgttattcgtcgggatcgcaaacggtgaatcatgaaaacaattggaagaaattgttggttgccatagctaggattgtagctgtttattccgtattgtgtatagctatgattacactttcattccattttattattccattgttccgggctagtctgcctgtcttttgggcaaatctggcaggagctgtttttactatcgtttgcatcgcacctttcttgcgtgccattattatgaagaaaaaccactctgtagagtttcaggcgttatggcaggataatcgtttcaaccgggcacccttgatttctaccattttactccgtataatgatagctgtcatgtttgtgatgtttgtgatagagaaactttttcaggcttccacgactttgctgatcggtatagctgttgttttggtaggtatgatgatgttctcgcgatggctaaagaaacaatctatattcatggagcgtacttttattcagaatttgcgtttcagagatgtgcatgctgaatttacaggccagaaacgtcctgagtatgaaggacatttgttgtcccgcgacttacatctttcggattttgagatacctgcggattccttatgggcgggacatacattaagagaattgaatttagggcataaatacggagtgcatgtggcatctatcattcgtggaatgcatcgtattaatattcctggggcgaatgtacgtctgtttcccggtgacaccatacaggtaatcggtacggatgagcagttgggcgagtttgcccgtcaagcagaaagagtatcagccgccgccgaagaggaagatttggaaaggcgtgaaatgagtctgaaacagttcattatagatcgtaactcatttttcttgggtaagaatatcagagaaagtggtatccgggatgagtacaaatgtctggtagtaggcgtcgaaaaagaagatagtacgctgatgacccctgatatcaatgtaccttttacggaaggagatgtggtatgggtggtaggcgaacgggatgatgtgtaccgtttgttgggtaagaaagaaaaagaggaagaataattaattttaataaataagaaaaccatgaaaagtgatcctaaagattgtctgtattgtcagaacaatgagacattgcacaatttaatgattgaaatagcgccactgagtgtttcacgtgtattcctttttaaggaacaaacctatcgcggacgttgccttgttgcttataaagatcatgtaaacgacttgtttgaactgagtgatgaagaacgtaacgcatttatggcagatgttacccgtgtgacccgtgccatggacaaggctttccatcctgaaaaaataaattacggagcgtatagtgacaaactttctcacttgcattttcatttggtccccaagtatgtggatggacctgattatggaggtgtatttcagatgaatccgggaaaagtttatctggctgatgcggaatatcaagaaatgattgaagctataaagaaaaatctgtagtagcgattagtggttagtgattagtgcctgcggtgtatgcatccgctattaaccactaatcactaactattaactaatcactctttttcttcgaaatcaaattcaaagtcgaagtcatcgtcaccgaaatattcaggagtaatgaactcttccatactgcgacggtcctttttagtgggacgtcctgttccgcgggcgcgatcaacaaaaccgctgattttgctcatttccagcaattcatattgttccggagtcgttacattctccagtatttcaggaaccaatttggcacctatacgtttttctattgcctgtaaaactttaaatgagtacgtgacaggtggtttctttacctgtatcacttctcccggttttatcattctcgatggcttcacctgagtgccgttgatagaaacccgtcctttcttgcatgcttcggcagcgatagtgcgggtcttgaatatacgtgaggcccatagccatttatcaattcttgcttcagccattactttttattgtattggttcattgttatactgatgcctgccaggcaaaaactcttaattatgtcgcaagccgttgctacacgttcgtccatggtcttcaaatctttatcagtgaagtgacctaatacaaaatctatttgcccgccacggggaaaatcgttgccgataccaaagcgcagacgggcataatcttgtgtgcccagcgtagcagctatatgtttcaaaccattgtgtccggcatcgctgccttttcctttcagacgtaatgtaccgaaaggaagggcgaggtcgtccaccactaccaacacattttccaacggaatgttttctttttgcatccagtagcgcactgcatttccactcaagttcatgtaagtagacggtttcagcaggataagctggcgtcctttgagcgagagggtggcagtggctccgtaacgtccgtcagtaaaaacaagattggacgcctttgcaagggcgtccaatactgtgaatcctatgttgtgacgggtatttcggtattcttcacctatattacccagtcctgtaatcaaatatttcattgataaggattaaagggttactgattatttaccggcagttgcagcagcaccacgagcggcacgagttaatttaactgcgcaaacaacggcttctttagcgttaatcaattccaaaccttcatagcttaattcgcccactttgatagtcttgcccagacccaaagaagttacatcaacaaccaggcgttcaggaattacattgtataaagctttcactttcagtttacgcaactgtaatgccaatttaccaccggcacgtacaccttctgccaaaccttccaactgaacaggaacttccataacaataggtttggcttcatcaatctgatagaagtcaacgtgaaggattgcatccgttacaggatggaactggatatctttcaaaatagcgtttactattttaccatcaatgttcaagtctacaacatagatgtgcggtgtgtataccaagttacggagtccttcggtgggaacggagaagtgagtagctacgggcaagccgttttcgtctttctgcactccatacaatacacaaggaacaccattgttcttacgcaattcgtgagttgctttctttcctacgtctgttctgacagtacctttaatttcaattgatttcattgtttttaaattttttgtgttactctaaattaagttgatcttattgcttaattcgccatcacacgatgtggtatatcacacgatgagcttgaaaaagcggtgcaaaattactgcttatttccgacttgacaaaaagaaagcacaatttttttatcattgtgctttctttatcagttggaatcagaaatcgatatctattttaatttcattcggactaagcggtttgtgcgcatcttcggttgtttcctgttcttcattttcagtgtgatgaggttcaataggaccttgctcttcggcaataaactgtatagcctgttgtaaaccgttcatgaacttctcaaaatcttctttatatagaaaaatcttatgtttttcgaagcttacttgcgagtcatcaccttctcccgaaacaattttcttgctttcagtaatagccaaaaacatttcatcttttcgatttttcttcacatctaaataataaatacgtttgccggctttaattgcttttgaaaaaacaatttctttgtcaccatccactacacttttctttttataatcttccataacttaagtatctttataaatcggcttcaaaattggacattttttttaaatgggcaaaaaatttgcggataaacttcgatgaaaaaagcgatttagatagctctatgtaaattttacattaaaaaatgtaattatgttatgtaaaatcaatgaaaatacctacttttgcaactccttaataattttatgtgaattatgataaatagagttcttattcgtcttaagatagttcagatagtctatgcttattatcagaacggaggcaaaaacttggatacagcggaaaaagagttatttttcagcctttctaaagcgtatgacttatacaactatctgctgcttttaatggtagaggtaactaaacaggctaacaaacgactgaatgctgcgaaaaacaaactggttcctactaaggaagaattgtttcccaacactaaatttgtagaaaaccgctttattgcacagttggaggtaaacaaacaactgctggagttttcgaacaatcagaagaaaacttgggagaatgaagctgatttcgtaaagactttatgtgataaaatcttagaaagcgatatatataaggaatatatggccagtgagacttcttcgtatgaggaagaccgtgaattgtggcgcaagctatataaaaatattatttttaataatattgaattggatcaggttttggaggaccaaagtttgtattggaatgatgataaggaaatagtggatacctttgtgttgaagaccatcaagcgtttcgatgagaagaatggtgcaaaacaggaattgttgccggaatttaaagatgaggaggatcaagacttcgcacgccgtttgttccgtcgtactatcttgaatgccgattattatcgtcatctgattagcgaaaatacaaagaactgggatttagaccgtgtggctttcatggatgtggtcattatgcagatcgctttggctgaaattctgagttttcccaatattccggtcagcgtatcactgaatgagtacgtagaaatagccaaactgtacagcaccccgaaaagcggtggctttattaacggaactttggacggaatcgttaattcattgaaaaaagagaataagctaacaaaaaattaatatctttgtttgttattgaagaataacagcattataaactaaaaacatagaaagtatgaacttattatttgtatttctgcaggcagggggtggaggagattactctttcctgattatgatggtagccattttcgctattatgtatttcttcatgattcgtcctcagaataaaaaacagaaagagattgctaatttccgcaagaatctggaagtgggtcaagaagtgattactgcaggtggtatatacggaaagataaaagaaatagaagataatacagttgttttggaaattgcatcaggcgttaagattaaaattgatagaaattctatcttcgctaatgctgcatccaaccaacaacaggcaaagtaaatgacatgataacatgttcgacaaaaggaacatacgtatttactatttaaagactttagagagaatcagaagcttcctgcttagccgtaatagcagggagttcctgattttcttgttttttgtatttgtatctttctgcttttggttgcttcaggtgttaaatgatgactatgaaacggaattttccattccgttacggttgaagaatgtacctagtgatgtggtgttgacctccgaacttcctgatgaactgcgtattggcgtgaaagacagggggactgtattggctaactatatgctggggcagacattttatcccattgttgtggacttcaaggactatgaggataaagggagccgtgtccggattccggtttcagctttaatgaaaaagatttcggtccagttgaatcagacaaccaaattgctgaccatacggccggatactgtggagtttatttatacgaaagggaaggcaaagaaggtgcccgtgaagttacaaggcaaggtggctttagaccgccagtattatatctcggatatcatttactcgccggattcagtgatggtttatgctcctcaggagattttggataccatcacggctgcttatacacaggcattgaattttgaagatgtggcagataccattcgtcgtagggtgaatctggccgatgtacgcggagcgaaatttattccctcttttgatgatgtgactttattggtagatatctacgctgagaaaagtgtggaggtgcctatacgtggcatcaattttccgcccgacaaggtacttcgtacttttccttccaaggttcaggtgacttttcaggtaggtctgagtcatttcaagtccatcacttccgaggatttctttatcggggtgacttatgagtctttgttgaacaataagggggagaagtgtccggtcaatctcaaatccatcccccgatatgtgaaccatgttcgtttgaatcccaaagaggtggattatttgatagaacaacgaattaaattcaatgattaagatagcggttaccggtggcatcggcagtggaaaatcatacatttcccatttgttggagaatatgcatatccctgtgtataatgcggataatgaagcgaaacgtctcactacttctgatgccggaattcgtggggaactgatcgctttgttaggtgaggatgtttataaggatggtctgttaaacaagccgttgttggcttcctatctgttttccgatccggcgcatgtgctccaaatcaattccattatccatccccgggtacggaaagattttaccgtatgggtggaacgtcaggaaaattgtgagatagtgggtatggaatcggctattttgtatgaggctggttttcaggatacggtagat

SEQ ID NO: 14407 - DNA, 286 bp, Unknown
  gut microbiota DNA sequence
ctgagaggaaggtcccccacattggaactgagacacggtccaaactcctacgggaggcagcagtgaggaatattggtcaatgggcgcgagcctgaaccagccaagtcgcgtgagggatgaaggttctatggatcgtaaacctcttttataagggaataaagtgcgggacgtgtcctgttttgtatgtaccttatgaataaggatcggctaactccgtgccagcagccgcggtaatacggaggatccgagcgttatccggatttattgggtttaaagggagcgtagg

SEQ ID NO: 14408 - DNA, 342 bp, Unknown
  gut microbiota DNA sequence
ggatcggctaactccgtgccagcagccgcggtaatacggaggatccgagcgttatccggatttattgggtttaaagggagcgtaggcggacgcttaagtcagttgtgaaagtttgcggctcaaccgtaaaattgcagttgatactgggtgtcttgagtacagtagaggcaggcggaattcgtggtgtagcggtgaaatgcttagatatcacgaagaactccgattgcgaaggcagcttgctggactgtaactgacgctgatgctcgaaagtgtgggtatcaaacaggattagataccctggtagtccacacagtaaacgatgaatactcgctgtttgcgata

SEQ ID NO: 14409 - DNA, 14430 bp, Unknown
  gut microbiota DNA sequence
aaggaaaaggtgttgatataattttaaaagtatggaatcatatttgtcataatgaaaaatataaggattggaaattatatattgtgggcgatggtgaggaaaaaaaagaattagagaagttggcgattgaaatgcagcttgttaattattcatttaaaggttttcagaaacctgatatttattatgatcaagcaaagatattctgtatggcatcgacttttgaaggttttggattagttttgatagaagctatgtattatggtgctgtacctttggcattcaacagtttttctaattgttcagatattatagatgataaacaaaatggatttttagtcactcctttttcaatagaggaatatatacaaaagttaactgggctcatggaagatgagaaaaaatggactacaatgtctatttgtgctatgcgtaaaagtcaagaattttcaatcgaatctataggaagtaaatggttgacattattcaaaattcttttggaaggtgaaaaatatatttagcgtaaacttaataattgctatataaatgtatgcaccaataataatttttgcttttaatcgtccgaaagcattaaggaatgtggtttgttcgttgttgcagaacacagaagctagggaaagtgatttatatatctttgtggatggagcaagactacataaagatggagagttgaaagaagtggaattggtacgggagtatgtgatatcaattacgggttttaagacattacattatacattttcagaagtgaataaagggttaggagcaagtattatagatggcgtttcggaagtaataaaccgatatggaaaagttattgtccttgaagatgatctttgtgttcaacctaattttttggcttttatgaatcaaggattaaaatattatgagaaagtaaatggtgttttttctatatgtgggtataataataagataaaaattcccaaagattataaggctgatgcgtatatttataatagaagtagttcatggggatgggccacatggaaagatagatgggatactattgattggaagttagaaccatttgatatatataaatctaaagcaagagttttccgctgttgggcgggatcagatgcttggaagatgctgaatgattggcataaaggtaaaaataattcttgggcaatacgttttgtctttgctcagttcctacagaataagaagtgtgttaacccttgttatagtcttatcaataatagaggttttgatgggcaaggtactaactgtaaatcctggagccgttttaaatttgaattagaatctacgggtaagaagaattttgtatggcctacacaattgagtataaattcttgtctatttaaacgtgctatgtggtataattcggtgtttattagaatttacagtagaataatgtatttaattaaatagtagcaatggatataactgactgtaaaattattgaattgccaaagattgtagatccacggggtaatctgtcaattattgagcaattaaaacagattccgtttgaaataaagcgggtctattggatatatgatgtgcccggcggaatggatcgtggagaacatgcatataaagagaaccaggaatttatagtagccctgtcggggtcgtttgatgtggtactggatgatggtaagaataaatgtgtttttcctttaaacagatcttataaaggattatatgtgactaaaggaatatggcgcagaatgacaaatttttcaacaaattcattggctcttgtcttgtcatcaactgattacaatgttaatgactacataatggattatcaggaatttaaaaaatgggtactaaaatgagaagtgtctttgattgttcgctatatgaacttaacaaatcacatgatccggaaggtaatttgacttttatatacgagaatgtgcatgtgccatttccaataaacagagtattttacagttatgatattccaggtggtgaagatcgtggtgctcatgcgcataaggaatgccatcagtttataatagcagcatccggctcttttgaagttgtattggatgacggtgtaaacaaacgtactgtattacttaatcgtccattttgggggttgcatgtgccgccgggaatatgggcgtcagaacaaggtttttcatcgggtagtatctgcttggtattagctagtcatggatattcggaagaggattatattcgtgactatgatgaatttctgaaatatgttgaggaacaaaagaataattgatttgatataatgattgtatatcgattgaataataagtgggatatggtgaaatttttagatttacaagcaatcactatgcgacatggtgatgagattaaagctgctatagacagggttgttgaatccggttggtttttacagggaaatgaaaataaacggtttgagatggactatgcaaaatatatcggtacagagttttgtgtaactgtagcaaatggtttggatgcattaaaacttatattgcgtggttataaggaaatgggattgatgcaagatggagatgaaatcattgtgcctgccaatacgtatattgctacaattcttgccattacagacaataatcttgtacctgtacttgtggagccaacgtgggatcatttggagataaacatagatgccattgaggaacacattacttctaaaaccaaaggggtaatgatagttcatctatacggtcgtattgcctataatgataagttacgtggaatttgcgagaaatataatttgaagttaatggaggattgtgcacaaagccatggttgtgcttgggatggtgttaaaaccggtgcgttaggtgatgcagcggcacatagtttttatccgggaaaaaatttgggtgcgttaggtgatgcaggtgctgtaactacaagtgatccaaaattggctgaaattattcgtgcattagcaaattatggaagtcataaaaaatatgtatttaaatatgtaggaatgaatagccgtatggctgaaacagacgcagcagtacttgatgtaaaactaaaatatttggatgaagataatgcacagcgccagaaattggctgattactattatacccacatcaataatcgcttcataattttgccgaaacggattaaggatgaatgtaatgtttatcatcaattccctattttttgtcagcgtcgtgatgaattgcaagaatatttaaaggaaaatggagtacaaactctcattcattatccgatacctccacataagcaggaatgttataaagcatggaataatcggacttatcctattacagaaatgattcatcaacaggaactttccattccgatgagtcaggtcgtgacggaggcagaggctaagattgtggttgatgtgttgaactcatttagataataaaagataataccatgttgtattattgtacgctctttgattccaattatattagtaaaggaatagcattatatctttcacttgagaggcatacggatgattttctgttgtatgtaatggcgatggataggaagtgtgagaaaatgttgaaaaatatggattttgcgcatatgcatgtagaatgtattgaagatattgaaacagggtcattacttgaggctaaacagaatcgttctagggctgaatattgttggacttgtggttctgtggtaacagagcatttttttagaacacgtatgctacctgaaataacttatttggattctgatttgatgtttttctgttctcccaaatgtgtggataatgaattaaaaaaggcaaatgcttctgttggtcttacgccccattttattaataatactatatttggtgtttactgtgtacaatatgtttattttaagcgggatgaagatggtgaaaaatgtttaaattggtggaagaatgaatgtctgaaatggtgttattcaaaactggaagatggtaaatatggtgatcaaaaatacctcgattatatgaaaaatatgtttagtaatgtgtatgctattgaaaatagaggtgtgggcattgctaattggaatattgagcagtatgattatcattttaatgaaggatttttaatacatcagggtaggcggtggcctattgtgttttttcattataatggtgtgaacgtgaaagtcgagaacggaaaactgatatttgtttatagtaagtatttaaccaaagtggtagtcgaaacttttatcaaacaatacgcagaattgctcacatttgtatatattaactatttggggattaaaattgatggttttgaaatgtatccacagaataaggtaaaggtgattctgaatggattatggctttatgtgagaggaaataaaatagctatgaggttggaacagaaatttatggagcataagtatatacaacgtgtatcaccttatagtgaaagaaaaaatagataaggtaggagtatagccgtatcaaaatttaattatcgaaacaatattcatgttattgaagttaaaaaacttacccttgttggaaagccatcgagggctgaccactttgccttccggcaaactcctaatcaacaccatcaacgcccattcctacaataccgcccagaaagacaagctctttgccgaagctttgcagcagggagatgtgttaatccccgacggagcaagtattgtcaaggcgtgtcgttggctgaatgcgagatccaaacctacagagcgtattgccggctggaacctgttcgagttcgagatgaacaagctgaatactatcggaggaaaatgttttttcatgggcagcagtgaaaaagtattggcattgataaaacagcgtgtgaaagtggattatcccaacatcgaagtggaaacttattcgccaccctataagccggagttttcggaagaggacaatcgggcgatagttgaagctatcaacaaggcaaatcctgatttgctctggatagggatgactgcccccaagcaggagaaatgggcgtacacgcattggcatgaattaaaaatccattgccattgcggaacgataggtgctgttttcgatttctatgccggaacggtaaagcgtgctcccacctggtggcagagacattctctggaatggtgctaccggttgttgaaagaaccccgccggatgtggagacgttacattatcggcaatctgttgttcatgtggaatatatgtaaggagtaacttgatgaaaagaatcttattgctcgttttttggtgtagtgtttccttatgggccgatgcccaggcattgatggggactaccggactgcttcatgctcccacggctgatatgcagcgtgataaaacgttcctgtttggtggaaactatttgaatactcatccgttatccacccattttcgtagccgtgaggtggggtacaccttcaattattacataaatataacgatgtttccctggctggaggtgtcctatatctgtacattagtacatgcggatcacggctctacttatttcccggaacagtcttgggggaaattcacgaatcaggaccgggctttcagtgcgcgtctgcgtctttggaaagaagggtggtggaaggagtggacaccgcaaatcgtactcggcttggatgatcccacttctcatgccgatcatggcggcggtggactggtgtctggtaatacaagcggttccaataactacgcaacacggtattatctggctgtaaccaaacatctggattttcagaacataggtgaatggggtattcatgccgcatttgtatatggtaatgccaaaggtatggagcattataaacgtccttcattcggcacaaacttccgttttcagctacttggtgaccagcctttgattaaaactgtaaataatcttaacctaatggccgaatatgacgcccgcacagtaaacatcggggcacactaccagctttggaaagaccacatcaacctgattgccgaactgaacaacgggaaatacttctctggtggcatttacttcaaaatccatctgaaatgataaaaaagactatccgattaggatctccggaatagattctgttcctttataaaaaaggaggatttatggttggaaatataagtataacagatgtgtatatgagtgtattgtcttcactgagtgtagatgaaaaaccggatttgattgcaaaactgacaaattccatcagaaatacgtatacaaaggaacaggatattgaaacagaagatccttttgcttgttacgaaggcgattggggcggaaatatgtcagctgaggaatatgcagatgatttatgtaagccctaatttgagggtttacctttcttatatccaactgttgcaaagataataaaacagctatcccgggtgcaaaaaccgccatagaggcagtctccatacagaggcgctctatggcggtttcccgtttcccctcgtttaccggggaaaattcccgtttccgggaagtcgggaggttactcttccattttgagcttgcccagttctttcagaatgtgctccatggcttctttgtaaacctccggtttctctttttccagccatttcatcagtttgaagtaagaatttggagtcacaatctttccgtctcgaattttggtggcggtggaccggcctatcgcacctttgtcgcccaagttgttggggtttaaatcgtttcttcgcacggcattaccgatgcaggtgctgatgatctcaaatttttttcatgttactaaaaattaaattattaaataatgatttgtaaacagcataaacatagctacttacaaaatgtctcggcaaagataggaaatgtttattaacaattgcttgtttttgtgagcaacgccctatttatattttgcgttcctttgcgttatatttatactaacacacaaaagaaatggattatacagagcagtttatccggctgaattgcagtttgatgtcggattacaaaatgatgaagctgaatgccgatatgaaatgcatggggctggggttgtatcttgaaacgatattgtttctgcgcaaacagcaggaatacaaacatgattttaacgaactggatttgctggccgatcagtggggagctaccgtggaaaatctgcaacatcttattaaggacttcgatttgtttctcattacagaggacgggtatttccgatgtctgtatctggacgaggtgatgggatatcagagtaaactttccgagcaacgtgctgctgccggtagtaagggagggagaagctgtaagaaaagtacggtgaaagcatctgcaaaagcaactgcgtctacagcgtctgcaatagggaggggcagaatcaacgaggggaaaaacggtgatgcgtcctgcgtggataataacggggaagtctacatgaaaagcgatgatacaccttgcatggataataacaaggaaatctatacgaaaagcagtggtgcaccctgcgtgaataataacaaggaaatctacatggaaagtggtgatacaccttgcgtggatcgtaacgaggaagtctacatgaaaaacggtgatacgtcctgcatggataataacgggaaagcctacctgaaaagtggtggtgcaccttgcatggattgcaacgaggaaatctacatgaaaagcggtgatgcgtcctgcatggatcgcaacgaggaaatctacatgaaaagcggtgatgcgtcctgcatggatcgcaacgaggaaatctacatgaaaaatggtggtgcacccagtatggatagcaaggagagaatttatatggaaagcaggaatgtagatagtgacaaggctgtctgcatggataacagcaagccaatccattcggattataataaggaaatctacaaggaaaacagcacggaaagcaacgtgaaaagtagtgcggaaagtatgaaaaatacgactgcaaaaaatacaaatgaaaattcagtcaaaaatgtgaatcaaagtgttgataatgagtgctatggaaagaacttgcaagcaagctttaagcaaagctttataagagaagaaaagaatagaggagagaagaaaaacaacaataacaaagaaaaagaaataattgctgttgctgctgttgataaacttccccgattttccgaattgtccgaaacgataccccgatgggaacaatgcatcaatgaagctttcattactcagagttggctggaggctgtggggatgatgtcaggtttgaaagaactctttttgaacaatctttcttttattcgtgatctgttcaagaaacatgtcgtggcacaaggaaacacaggaggaatcacttccgtgtccgaagccgaagcttatttcgccaactacatccgccgagaaaggcccacccgtctttttctggaagaaaagctgaaagaaaggagccggatgcaaaatgaatcgatatcactttcaccctacgaaacgtacaatccgctgaccggcgaacgttcgtactgcggagtgcctcttcctgtcggtgcacccccgcgtcccaacggacgtgccacctgggataacctgaaacagaactggatatgacgcgcgaagaacatgcagattatgtgcggtggctgaaaagcctgccgcgcagaaaagaccatttccgtatgccttgtcccgaatgttccgcaacgcgaagcaatcccaaagatccttcgttcagtgtgcatatcacccgtgaagggggatgggcgaaatgctttcattgtgatttcgccatagcgtggaacgaggacgagatgtggaaaagagaacagaaacaacaagaccgggaacggcagaaacagcagaaggatgcatcgcagcaacgtaagtcgcagcaccacgatacagcatcgcagcaccacgatacagcatcgcagcaccataacacgtcgcagcaccacgatgcagcatcgcagcaacgtaacacggcgcaacgcaaaccgcacatccccctgcaaccgcctgtacattacgtatgcccggtaattaataaaaacaaacaaattatgaatggagaaatgatggaatacatggtcggcagacgaggtattccgatggacgtcctgacaaggatgaagatagaggaacgcttggaattcctgccgcagaccggcaaggaagaagcctgcatctgcttcccttacctggaggacggagtaatgaaaaacatgaaattccgggatgccgcaaagcatttcaagatggtgaaaggagccgagctgattccttggaacatagacgccataaaaggaaaggaaaagtgctacatcaccgaaggcgagatagatgccctcagcctgatagccgcaggactggaagaagtggtgtccgtacccaacggagccggaggtgcgaaccttcagtggctggaccgcttcgtggagtcgcacttcgatgacaagacggaaattatcctggccatggataccgacaagcgcggagtggagttgcgcgacgaactggtgcgccgcctgggcatggaccgctgcaaggtggtggcctggggagaaggctgcaaggatgccaacgagtatctgttgaagtacgatcttccgaggctccgccaacaggtggagcaggcggcggaaatcccgttggaaggagtcttctgccccatggacgaatgggatacgctgatggatatttattacaacggaatgccggaaggagccgatacgggactggagaatctggaccggctgatcaagttcgagcgtggttttgtgctcacggtcacaggcgttcccggtagcggaaaaagcgagtttgtggacgaaattgccatgcgcctgctcctgcgccacgattggaaggtgggctatttcagcccggagaataccccgctggcctatcactaccgcaagctgatacgccgcgtggtgggcaagcgtttcgaacacaaagggatgccgttgccggaagctggacaggccatccgttacctggcacagagtgtcttctccattatgccgaaagaggacttctcggtagagagcgtgctccgcattgccgcccaactggtaagccggaaaggagtgaaggtgctggtagtggaccccttcaaccgcttcgagcatcagattcccgactgggagacggaaacgcagtatatcagccgcatcttcgatgagttctccaattttgccgtgaagcacaaggtgttgctcatcctggtggcgcaccccaccaagttgcgccgcgaaccgggaagcaaacgctggcctgtgcccacgctgtatgatatcaacggctcggcggcctttttcaacaagacggattatggaatggtgatagaccgtaacgatgaactggggcaggtgctggtgcgtgtagccaaggtacgtttcgaccatctgggcggaccgggagatgcttttttcgccttcagcacttacaacggacgctacacccctaccgaggagaggaccttggatcataatccgcccgaaccgaagtgggagcataccaatttcctgacagagaagctgaaacccgaacagcagggcctggggtttaatgagggggaatgaagtagttgaatgttgctgttcctgaataactcagggataggagaagggagatatgtcaaaacaaaaaggacagccccgaaaagttacagatagtaattataacacgtaaaaggggcgtatcaagctctgtatggagtaatgatacgaccctttctttagtcttttaggatactcaaatttcagattataagttcatgttttcaaaaactgagttttgacacccgctttttaggtcttgtagttacaatctgtaacttttcggagtagtcatttgattttgacatccccctttaaaagttgtttacaagtagatcatgttgccggcaggttttactgattactgaccattcctcagtgatcactgatcattcctcattaatcactagccattaaaatcctctccaccgttcccgttttatctcctcgcactgccgtcgctgccatgcgggcattattttctccagctctttcagtttccatcctttcataaaacgtatttcgtctttctcctgctccgtgcacaggctgatgcgcagcagttcgggatagagcacctgtatatggaaaatcttggctctccacagcagcatggacatctgccagggggtgagggcatggatgcggttcagggtgagcagcatttccagataatgacggtagaaggctttgtccacggtcatgagttggtttatcagatagttcatttttattattgttaaatgaaaagattagttgaatggatagtcaggaaatcaaagcggaggaaaggaatgctatctttggagaaatcatccttggatacggtatctttggagaagcctctttgaaaacaaacggttctcattgggaaccctatctttggagaaatcatccttggatacagtatctttgaagaagcctctttgaaaacaaacagttctcattggaaaccctatctttggagaaagcttcccttaaaagcggtattcctttacagcatcaaaacaaggacacggtttcacgggattcaggtcatgatgccccactatcaacgctttggggaacaggaggcgcagctcgcgcagcagtgccagcatacttcccttctgcatcagagtacgcgtatcggcaggtgtgcagtccgccgagagtccgccctcatagcagatgccgatagaatgccggttgtggttcttgcaatgcgctcccaccttttccagaggtcgtccgcggtgaatctctccgtcgcgggtgatatagaaatggtatcctatgtccgtgaagccccggtggcggatgtggtcctggcggcaggtctcaaaatccagcctccgcccctcaggggtggcggagcagtggataataatcagggtgatggttctcctgttcatcagatgcaggcgttcaggccgagtgcgccggcaacggcggtggctacggtgatgattactttcagaatcagtgtccaggtgtttttctttgttcttgaactcattggaattttgttttagaggttgataataagtgaattgtaatggaagccaagggctgaatgtgcccctatgacaagccgtttttcattggggcacattcagccctttagcgtcgtgtcttgcctccgtcgtactggggttccgtcaggcctgtcctccgttttccggttccttcgcctctccggtaagatccacactggtctttccggctttcagcgccttcaccaccagtcgggccgccttgcgcgtggccaccagattgaacacagcttcctcctgcaagttctggaaacgtgttccggcactccagttcacattcagctttctgacatggatggcaggattgtagtcggcagcgctttccgcacctatactgttgatgctgatggagaaatcccccaagtcgcccagctgtatcttctgtcctcccagaagctgttccctcatgcagtccactgccatggtgaggatagccacgatgtccgcacgcttgtacacacagccgtggctggcgatgtgctcggcaaagcggttgatgtccatcacttcagcatactgtgcactggcgtaggccttcttggcggcatccacgtccatcggattgctacgcataacgatactgtaatttaccatagtctgttaaaattaaaagttgataattgagaattaagaaacactgttgccggggaatgaagtaagtcagccgtcagtcactgtccattaaccgtctgccactggttgccgactgctgaaagaaccctatctttcacgtgtaagatcctatatcttacagctgtaagattatagatctttcgccttcatcgtcccgacattacaaagatacgatgtgcggattccggaaagttgattccggtggattgtggttgataacagttgattctagttgattattgttggaaaaacattcttttttctcgtccgtttttcgtacttttatggaagtaaataaaaagtatggaatgtatggagaattttgagatacgcacgtacggccgcaccgaactggccctgtgttatttcccggatttgaatccgcaggtggcttaccgtaagttgcagtattggattgactattatcctcacctcagggaggagctggagaagatgggcagtggtttgagttgccgtacctatatgccggctcaggtacagctgattgtgggggcgataggggagccgtgaaaggggattgtgatgggtgtgcagccaaataaaaagaatagcttccccaattacgtaattgatattgcaagtgaacgaccggttcgtgttgacagttgcattgaaagattggcaatgttgatatatgtgaatgaaaatgacacgaatgacgccaatcagagatataaacccaatttgcgccattcgtgtcattttcattctggataaagaacggaatagaacctctattcccgtatttcccccttatgcaccagcattttcaccagtgtccgtttggaattgtgcgtgtccgaaacccatagcacagagtcgttttgcgcatagatgcgggcaggctgggaaaaagcatatccttttacagtttttattttcttgctccattcgttggactggcgttcatatatgttgatggcgtcattatcgccggtagcataccagcggtcgccgcacaacgccagtgtcttgggcttgaagccgggcgacagggaaagatcgtccagatcgatggaagcgtcgtttgccagatcatcgttgaccagtgccggatcgagcacccgtattttctttccttcataatccgtgagcagcagatgcccttccgcatcgggctgcatggaatggctggcaaagccgttgttgcccggactgccgttgccggatgcccggcggtagcggttcaccttctggtaattttccggggtggcatcctcctctttgtaaatgctgaccattccgttcttgtcgcgtgcgaaaatcagcccgtcctttaccgtcatggcctgtgcctggaatacggggccgctccattgcccgttgcctatgcaggtgaggtaggacagttccggcaaccggaatacatggatgcgcgactggcgttcggccacatacagccggttgcccgacgggacgatggcctctatctgacttccgaaactcttctccccgccgtcgtgctgccagctctgcaaggttcccagccgttcacctttctttatactgaacagcaacaggctgctgcctgcctttccgatgtttgcgatgaaaagggtatcccccagatgggcgacggtataaggggtgaaatcctcggccatttccatgcccagggtttccgcatcaatcagttgcgccgcctcatacgagtaataccagtaactgttataatccccgtttccttctccttccccgtttcctccgccgggagcggaggggtagccgcagatttcatccagggtgactttgctg

SEQ ID NO: 14410 - DNA, 73495 bp, Unknown
  gut microbiota DNA sequence
agatgaaaagggtatcccccagatgggcaacggtataaggggtgaaatcctcggccgtttccatgcccagggtttccgcatcaatcagctgcgccgcctcatacgagtaataccagtaactggtataatccccgtttccttctccttccccgtttcctccgccgggagcggaggggtagccgcagatttcatccagggtgactttgctgcattgtgccgtcaggactccggacagcacaatcaggatataagcgtatattttcatgttgttcttactatattatataggtatatatttatttcagctcactcatggggatggcgtaaacgcatgtcccgtttttcacgcggtcggtgatgaacagcgtgtggcggcggatacagaacttctcgggtgcttgcagggtgatgccgccgatggtggtatggtccttcacgatctctcctgtccggggattgacctcacagaacttttctgtaccgttggaacttacaaacagccttccttcgtagaaatccaagtcgtagggtacatttttataagccagttgcccggtacgtttgggggaaactccttcccgtatcccgtcgggggcgaacaggtctatgcgtttggcgggatgggtggagtagagcaggccggtctgttcgtccactgccatgccgtaagtgccgtttgtctcgcccagatgttcggaacgtacataaatccgcggagtcactccggactgtatagcctgctcttctacaaagttgacgtagcgtttgtcgtgtatcatgaccagccctttgtagagcagcacatcgaaggcatgtacggtctgcgtgggccctgttccccagcttccattgcctatgcaggtaaggaactgatggctcttcgcatcaaaaatctcggtacggcttccttcgtgggtgacataaatcttgtcgtgggcacgggtgacaccgttcgggcggccgccgaatttcccggtaacttctccgtgcttccattccttgatgcttcccaagtgcttcttgccgctgccggcaaggccgaacacctctacgctgtaatggttgtccgcatcgttcacggcatacagggtatctccgtacacatatacatccttggggcggaaggtggttcccgtagcgccgggcaagtcggtataatccagcttgaacgccaccggctccccgtcgtttcctccccggtcggtttctccgcgcaggggagacaggccaccgtccagcgcatcgagttccggatcttcgataatgtgtttcgaagccacgtatatatcatcaaaataacggtttctgctccagcgggtgtgcaggaagcggcgggaatagacgggcagctccttgtccagcgacagcgccacatatacgttgttgcacagggtgatccaccccggtcccgtctgttcgtaggtcatgtttcccgcatggccgtagcccacacagtgggcaaactcgtggaatatggtttcggtgatgcttttgtcatcggcatagtgttccagataacacacttcatgcatgccgaaggtggttcctccgcccagtcccatcacgccggtggtatagccgaaggtcagtccgcggtggttgagcacgttggccagcagggcggtcttgtctatttccgccttgtcattgttgctgtgcagcgggccgaactcgtacagggcggtcttgaaccgttccgacgagaacatatatcccatgttcagcgcgatggccaccgcctcacgcgtgtgcgaagccttcatcttgtacttccagctgtcctgggtgtcactgtatctgccgaaggcgatgtaccatttgcaacggatggattgcagccttgcccagtacgggtcgtcacactctacggtgaaggtcaggttttcttccgtgaggtaggggtttgccatgatccgtattttctttccgctgcgggtataggcggtcaggtccttggtggcgaacggtatgtgtacccggagttgctggaaaggcatgatcttttccagcgacatgaacttgaattcttcctcgtaaccgtctatcctggcccagaaagtcacgtttttcaaggctctgggactatagaaacggagttggaaacagtgctcgtcgtccattccgaactgaagaggctggctgacgtagaagctgcgctggctggagtcgaaataaacatcctgggattcattgtcattcagcaggtaatacgtgttgtccgggttataatccgtttcggccagccggacgggcaattcattgtttgccacgtttccttctccggaaaccggaagttcgtcctctttgcagccgcccagcagtaaaagcatacctgctaaaatcaacaggctggtggaaaaaagttttttcatcgtctgtctttattagaattacatttaaatttgaaataatcactcttttgaaaaagggttgcaaaaataattgttttagatcagatgaacaaagaacccgtattgcattttatatgagcccctgttttttatgttcttttgtttttctgccttaaaaaaataaatcctatattgttgccctgggctttgttcatcggaaaatatgctgtatttttgttatccgaaataaagatgaagatatggcacaacctttagcagaacgtttgcgtccgaagacattggacgattatataggtcagaaacacctggtggggccgggggctgtcttgcgcaagatgattgatgcgggacgcatctcctcctttatcctttgggggcctccgggggtgggaaagactacgctggcgcagatcatagccaacaagctggaaactcctttttatacactgagcgcggtcacttccggtgtgaaggatgtgcgcgatgtgatagagaaggcgagaagcaaccgttttttctcgcaggccagccccatcctgttcattgatgaaatccaccggttcagcaagtcccagcaggattccttgttgggggcggtggagacgggagtggtgaccctgataggcgccaccaccgagaatccctcgttcgaggtgatccggcccttgctctcccgttgtcagttgtatgtgttgaaatcattggagaaggaagatttgctggaactgctgcataatgccatcgcaaaggatgtgatactgaaagaaaagaagatagagctgaaggagacggatgccatgctccgcttttcgggaggcgatgcccgcaagttgctgaacatactggaattggtggtggaagcggatgcggatgccggaaccattgtgattacggatgagaaggtgaccgagcgtctgcagcagaatccgttggcgtatgacaaggatggagagatgcattatgatatcatttccgcctttatcaagtccatccgcggaagtgatccggacggggcgctctactggctggcgcgtatggtggaggccggagaggacccggctttcatagcccgcaggctagtcatttcggcagccgaggatatcggtctggccaatcccaacgcattgctcctggcgaacgctgcttttgatgccgtgatgaagataggatggcctgaggggcgtatcccgctggcggaagctacggtgtatctggccaccagccctaagagcaactcggcatacgaggggatcaacagcgccctggaactggtgcggcagacgggcaacctgcctgttcccttgcatctgcgcaacgcacccaccaagctgatgaaacagttgggctatggcaaggattataagtatgcacatgcctatcagggcaatttcgtgcagcagcagttcctgccggacgaggtgaagggcagccgcatctggcatccgcagaacaatgcgcaggaagcgaagataaaggaacggatgcagagcctctggggggaacggttcaaggaatgaaaatgaatagcattgatcctgtgctataaaattaaaaattggaacgcaaatgacataaatccaaccttccggccggtttatatccatgctgtgcagctgttaatttgcgtcattcgcgttccaatctaaccgaataaatgaacaaaatatgaaatttaatttttgaaaatatgaaaatagtagttttagacggttacggattgaatcccggtgatttgtcatgggaggagatgcaggcgttgggcgagctgacggtatatgaccgcacggcccctgccgagttattggagcgttctgccggagcggaagtgctgattacaaataaaacggtgattacggcggaggatatggccgctctgcccgccttgaaatacatcggcgtgctggctacaggatataatattgtggacatccaggctgcgaaagcgcggggcatcattgtcaccaacatacctgcctacagcaccgcttccgttgcccagatggtctttgcgcatatactgaacatcacccagcgtgtaggccattatgcctatgccaaccgtcacgggcgttgggcaaataatcccgacttctgctattgggataccgacctggtggaactggacgggaagaagctgggaatcatcggcttgggaaacaccggacaggcgacggcgcgcattgctgccgctttcggaatgcaggtatgcgcctatacttccaagccgcagtcacaacttcccggaggaatccggaaaatggagctggatgagcttttctgcgaatgtgacgtggtgagcctgcactgcccccttacccccgataccaaagaactggtcaatgccacccgcctggcccttatgaaaccgacagctattctgataaataccggccgcggtcccttggtaaacgagaaagacctggccgacgcactgaacaagggcgtgatagcggctgccggactggacgtgctttcttccgagcctccccaatataccaaccccttgctgacggcgaagaactgcttcattacgccgcatatcgcctgggccacgaaagaagcccgtgtccggctgatgcagattgcggtggggaacttgaaaggatttatcaagggtgagattgtaaataatgtggcggaatgagaacaaaggaaaaagacgggaagaaaagaaggaggtgagaagaatggaggaagacaagaatacgttgggtttgcatccggaagttagggaagaagatagagtggcaaaggctgtagctttgttcagggaaggatataactgctcccagtccgtagtgacggcttttgccgatctgtatggtttcacccgtgaacaggccctgcacatgtccgcctctttcggcggcggtatagggcggatgcgtgagacctgcggtgctgcttgcggcatgttcctgctggccgggctggagaagtgcgccgtcgaggggaaagaccgtgagagcaaggcggcgaattacgctctggtgcaggaactggccgaagaattcaagaagcggaacggcgccctgcggtgtgccgatttgctgggattgtccagaaaagagccggtagtatccacgccggaagcaaggacggaacagtattatgccaagcgtccttgtgcaagaatggtagaggaagcggccaggatttggagcgaacacctcgaaaaacaaaaaaaataggttgaaaaatcgctttttcttatagaaatacaaacttttttgatgcaaaagtgttgaataacataattttgtgtatctttgcaagcgataagaaacacaaacattcacataggaatgtgtgggtgcggttaacgtttaactaaaagcaaattgaaaatgttgaaagaaaaagcaggtgctttggccggacagatctgggaagcattgaatggaactgaaggtttgacacaaaaacaaatcaagaaagcagccaaactgaaagctgacaaggatttcttcctggggctgggctggttactgagagaagataaggtcgttacttctgaagtggaaggcgagatctttgtaaaattagtgtaagaagaagattttaaactcataaaaaaatgcgttggcacatcgttttgtatgttgtcaacgcatttttttgtatattatagtaaaatgatgaatcatttctttgaatagtattcgtattattactatatttgcagggtaattaagtccaaaacgttatgagttacaaatcagtgaaagacgttgtaacgatgttgctggaaaacggttttgtattatgaaaacagtggaagtgattgtagaacacgcaggaaagaacttgagtgcttatatcgaaggtgctcccgttattactgtaggcaatgacataaaggagattgaggataacatgaaggaggcaattgagttgtatctggaagataatccgaatccttgtgaagtcttgtcgggagagtttgaattgaaatttaagatagatgccgctacttttatcaactattatagcagcatcttcaccaaggctgctttgagccggattaccggaatcaatgaacgtcagttgtggcattatgcagccggagtgcataaacctcgcaggcagcagttggaaaagatccagaaaggcatacagtctttgagtagggaattgtctgctataaatttattatagtctttaaaatcttgttctttttacgtatctttgcgcccggaaagcaagaaacttgttttttaaatagatagctgttaaagatgaagaatatccgtaatttttgcattatagcacatatagaccacgggaagtccaccttggccgaccgtttgttagagttcacaaaaaccattcaggtaaccgaaggacagatgcttgacgatatggacctggaaaaggagagaggtattacgatcaaaagccatgccatccagatggaatacgagtatgggggagagaagtatgtactgaatctgattgacactccgggacacgtggacttttcatacgaggtatcccgttccatagccgcctgtgaaggggcgctgctcattgtggacgcttcgcagggagtgcaggcgcagactatctcgaatctgtacatggcgttggagcatgacctggaaatcattcccgtgctgaacaaatgtgatatggcgagtgccatgcccgatgaggtggaagatgaaatcatcgacctgctgggctgcaaacgtgaggagattatccgtgcctccggcaaaaccggaatgggtgtggaggagatattgaaagcggtggtggaacgtatcccgcacccgacgggtgacgaggaggcgccgctacaggctttgattttcgactcggtattcaattctttccgtggaatcatcgcttattttaaaatagagaacggcgtgatccgcaaaggggacaaggtgaaatttttcaataccggcaaggagtatgatgcagatgaaatcggtgtgctgaaaatggacatgattccccgcacggagttgcgtacaggagacgtagggtatatcatttcgggcatcaagacttcgcgcgaggtgaaggtgggggataccatcactcacattgcccgtccgtgtgacaaggcgattgccggattcgaggaagtgaagccgatggtgtttgccggggtctatcctatcgaggcggaagattacgagaacctccgcgcctcgctggagaaacttcagctgaatgacgcctcgctgactttccagccggagtcctcactggctctgggattcggattccgttgcggtttcctgggattacttcacatggaaatcgttcaggaacgtctggaccgcgagtttgatatgaatgtgatcacgaccgtgcccaacgtgtcgtacatggtatatgacaagcagggacatgccaatgaggtacataatcccggcggtatgcccgatccgacgctgattgaccacatcgaggaacctttcattgacgccacgatcattaccgccaccgattacatcggccctatcatgacgctgtgtctgggcaagcgtggcgaattggtgcggcagaattatgtgtcgggcaaccgggtggagattcactacaagatgccgctgggtgaaatcgtgattgatttttatgacaagctgaagagtatttcgaaaggatatgcttcctttgactaccatcagtcgggtttccgcccttccaaactggtgaagctggatatcttgttgaacggtgagccggtggatgcgctttctaccctgacccatgtggacaatgcctataacctgggcaagcgtatgtgcgagaaactgaaagagctgattccgcgccagcagtttgatattgctatccaggcagctatcggggccaagattatctcaagggaaactatcaaggcggtgcgcaaggatgtgaccgcgaagtgttatggcggtgacgtgagccgtaagcgtaaattgttggaaaaacaaaaaagaggtaagaaacgaatgaaacagatcggtaatgtggaagtaccgcaaaaggcgttcctggccgttctgaagctggattaattcaagaataaaacaagctctgaggagcaaacaataagcgggctctttctgttagttgaaattaaaaagtcaataacagaaagggcttgtgttttgatggcaatttatcacaaactcttaaattcaattgatatggaaaaactgaaaattctgaacttgaacttttccttccagcgagcggcgcactatcatattaatggagggatgttgctgatgggggtagtcttgctggctatgttcctggccaattctccgtggggggatatttatgcctccttttggaattacgaagtgcatcttcagataggagaatttaatttctttagtcataacgggcatcacatgaccttgatgacttttatcaacgatgctttgatggctgtctttttcttcagtgtgggactggagataaagcgtgagatactggtgggcgaattgtccagtttccggcaggcgcttttgcccatcgtggcggcgtgcggcggtatgctggttccggtgctgatctattatttcatgacggcgggaactccggcccaaagtggcctggccataccgatggctacggatatcgctttttcgctgggagtgctcagcctgttcggcaagcgggttccgctgagcttgaaagtctttctgactgctttcgctgtggtcgatgatatcggcggcattctggtcatcgctcttttttacacttctcatctggcggtgaactacctgattgcttcggcgggtatcctgctgatactttgcggcgggaatttcttccgggtgcgcaaccgttggttttatattttctggggagtgattatgtggtatctgtttttgcagagcggcatccacgctaccattgcgggagttgtcgcagccttcacggttcccgccactcctcattacaagataggtaagtacattaaccgcatccgggagaacattgctgtctttcctgccagtgacaaggaaggtgttgtgttaagcaagatgcagatcaatgtgctgaaaagcatcgagtcttcctcggaccgtgtcatatctcccttgcagtcattggaagacagtctgcatggaatggtgaattatattattcttcccttgttcgcctttgccaatgcgggtgtctcgctcacggcggatcatggtggcttggaagtggggatggctacttgggcggtgctggcgggattgctggcgggtaagtttgccggcatttatttctttacctggctggtgataaagatggggttcgccggactgctgaaaggcatgacctgggtgaacctgacaggtgtctgtcttttgggcggtatcggttttacggtttctttgtttatagccaacctgtctttcggggattcaccggtgttgctgacgcaggcaaagatgggtgtcatactgggaacggtgctggcgggtgtgctggcgtatctggtcttgcagttcgccttgcctaaacagcctgcacaggaataaaattacagatagggcagtacggcggtgaaacggctgcccttgttcacctcggattgcacatcgatgtgtccgttcattttttctacaatgaccttgctgatggcgagtcccagtcctacaccctgtacaaattcattccgcttgtagaaccgttcgaatatcatttgtaattcttctttagggattcccgcaccggtatcttctacgaagaaatggatttcctttttctctttgtcgcagaaataacccagtttgatgtgtccttgggaggtgaacttcttggcgtttcccaaaaagttggtgatgacttgggtgaggcgcatacggtctatgtgtatggtcacatcctcgtcgggaaattctttgatgaattccacaggagggagaataattacctgatgggtctgatagaccgtttctgcaaaatgatgcgcgctgcaatcctcacaatgaaaggacatattgccggattctatacgggatagttccagcacatcattgaccagtttcaacaagagtctggtattgttgtctatgatggaggcaaattcttttttctcttcttccgagatgtttttctcggtagtgagcaggttggagaatcccacgatggcattaagcggagtacggatttcatggctcatgttggccaggaaggattgtttcagttccgcctgttccgccagtttgcgggcacgtatcagttcttcttccttgtctttgatctcctgaatgtttaccagaagtccggtgatgataggattttgttcataatgctgcaacacgctgtatctgaattcccaccattggtaaccggtgtcgtcgaatttgcaacggtattgggctgttcttcgtggccggtgtaatatgttggatacgttttttctgaactgggcttggtcgccggggtgtacatagttggctatttcctttatttccaacaggttttgggaacggttggtcagttcgcagaaagcttggtcgaacacggctgtttttccgtcgaaacaccaggcgtaggtttttcctccttccagtgcaagcgttaatgcttcgtgttcgaacctgaggttgcgcaaggcttcttttttccgtcctttttccagtgtatagatataaataaggtaggctatccccacaaggagtgtgaagaccaggaggcttgcaagaatcaggatgggggttgcgtatttttccctccacggcctgtacatgatggtatattccggtggaatgctttcaggggggatctggtatctcttcatggcctgccagttgaccagatgctgtttggcgatttgttttactgccgggacgggtatctttccttgcagtctttctttgatgccggcggtcatgtcgcttagctgtgtttcgatgggggcgaaataacctcccagcatatattcctttatcccgaatccttcgttgatggtttcgaagccgggattgtcgaacaggctgccgatgcgcagggtggtatagtcccgtttggtatacaggaacaaggagtatttgaagatcccgctggacagccacatcaggtcgcgggcagctacggaatcactggacaggcggactacgatggtggagtccaagtggttatattcgttcagtttttcgtgcagggattcatattcggtatcatctttgtcactgatggggatattcagcttgccgggcagggcctcttgtcttttccattggtggagggtgatttccgatcctttgcattgttcgctcaggtctttccagataaggcggtcaagcacggtccggccgttcaggatgtggatgcggactttgcccataatgcgttctatcatccggcaggtggtgaggtaatcgggtttgtctatgtagcccgtaatgttgggatattgtgccagcaagtcttggttgggataattcactccgctgaatacgacgggaatctgcctgacatacgggtttccgcaagccatgatagagtaggttgcctgatcatcgagcacggcaatcaaatccccttcccatgagcggatggaatctgcaaactcggaaatccgttgctcttcttctacagattcatatttctcgcaatccagataaaaagtgcgcagctggaagtctatttgctggtctttcagtcctttgacaaacagtttgtttacaatgccggcaccgctgtacccttcctggtaggaatggataagggctattttatatttttgtgcataaagcggactccctataagaagggctgtcataaaaatgaaaaaggctttatgcttcatgtcaaacgtgattattaagtgaaccaagggacaaagataggaatgtttctttaattccggctatgatttacaggaaattattggaagagagagggaaagtaaccatcccggtttgtggaaaacagcaattccggcttcttgaaaaacatgcttcttgcttttcaaggaaccggaatagcctgtgataaaaaggaatgggctaacccgttagcgggggttatttgtgttgctccggggtcggggtgctttgagaggccggtccggcggcagcgtttgtagaggcgcttgaagcggaacttttagccgcgccggaaaccggagccgctgtctgtgccgttgtagcctgtacttcccagtggaacggttcgaactgtgtgttcttgtctacccatgacggtttgcgcgatgcatagataatgaacggagctgcgactaccacgatgcagccgataatcaaaacggcaaaccatacggtgttgctgcctaccgcaatctggctggggggaatgaagctgagcacgaatgccagtagtgaaccacagaaacccagaccgccgatgagccacatcagtccgttgcctttgctgccgatacggaatgggcgaggagtctttttcatattgtaacgcagatagatggcgccgctgaacatcagcagatacatgataaggtaaagcaatacggtgagctgtgacaggatttggtagaaactctgtacggaaggcatcacaacgaacagcaggctgagcaaggttacggcaaggccttggaccagcagaatgtttttctgtacgccgttggcgttggtcttctggaagaagggaggcagatagcctgctttacccactgcgaagatacctttggacggaccggccacccaggtcaacacacctgccagcacaccgaatgccaaagccacggcgatgataggtgacaaccacgaagcatggacatacttgaagtaattatcaaaacctaccagcaggctctgagtcaggttgatatccttttcgggaataatgatccccagtgcgaaggtgccgagcacgaagatgattacggtaatagccgcaccgatgaatacagctttcggatagttcttggcaggattttctatgtcttttacgtggataccgcccatttccataccggcatagaacaggaagatgctggaagccagcaccaggttgtcgaagttgctgaagtcggggaagaagttgccgtcgaagttcatctggctctgtccgccggaggcaaggtaaatcaccgccagtaccatcagcaggccggcaggaataatcgtacctaccataccgcctactttggccactttgcctacccagcccatgcctttcagcgaaatgaaagtggccagccaatagataatcaagaccaccgccagtgagtaatagcggttggatgccaaggccatatcatgggtgtcactcatgccgataaaagccagtgccacagctccgaaagtcaatacggtgggataccagatggtgctttccacccattgcaggaagatggcgaggaagccgaatttctttccgtaggcttcacccacccatcggaacacaccgccttgcttgtcctggaacatggccgccagttccgccgctaccaatgaggtaggtatcaggaagacgatggccgcgaataaataataaaatgccgaactcagtccgtattcggcttcggcaggcagcccgcgcagggatactaccgcagtcacgttcataatagcgagggtaaatacccctagcttgactgatttactaatgtttgccataaagtttaggttttaaaaaatatatgttttttgtttacggagtttataacaactccttggaaatgatgtttatccgtttaggtttattaacccggaaggtatgcggaattaaacaatcgtacccggaagggtgtttctagaaaaaataatataatcagtatagtttatgaaaacagctttctcctcattcatctattcccgtagggggatttacgggatcttgcatatattcatcctgttgatgtccctttttctggttatcagtatctcgatagatacttttcataacatccctttcctgaatcaaggttcttatctgaagattcagttctggatatgcatgtttttcctgttcgatttcctgctggagtttttcctctcgaaagaaaaaggaaggtacttcaccagccattttatttttctgctggtatctataccttatttaaatatcattgatttctatcacatcactttctcgcccgaaatcagttatttcctgcgctttatccctttgctgaggggagggtatgcactagccatcgtggtgggctggctgtcgggcagcaaagcgtccgggttgtttacctcgtacatcaccatgctgatggccaccgtgtattttgccagtcttatcttctttgtgctggaacataaggtgaaccctatggtgacggactactggagtgcgctgtggtgggcttttatggatgttaccaccgtagggagtaatatttatgccgtcactcctacggggaaaatactgtcggtggtgctggccgccctgggaatgatgatgttccctatcttcacggtatacgtcaccagtctggtgcagcaggccaacaagcggaaggaggaatattatcaatctcaacaatcggagccggcggatactaaataatagcttgaacttcgtcaaaaataagaaaaaagtcttatcttcgtagccaataacaaattgctaacctaaataaacaacaagatgaaattattggctctgtgtgcggcggggataggcttgatgctgtgcgcctcgtgtacaaacaacaaacatttaatcagtgatgaggctgaacgtgccgctgttcagcaggattttgaggcacggcgtgatacgctgacccaaggtaacctcttccaggtatttgaacaacccatgagcgatgaacagaaggaggcgatgactttcctttacgcctatatgcccttggcggatatagcggaccatcccggtgaattctatctggaaaatgtggactacgccttcaaggcgcgtgaggagatgccatggggaaaagtggttcccgaacgagagttccgccactttgtattgcccatccgcgtaaacaacgagaatctggacgacagccgtaaggtattctacgaggagctgaaggacagagtgaaaaacctttctttatatgatgccgtgctggaagtgaaccactggtgtcatgaaaaggtgatttataccccctctgatgcccgtaccagtagtccgctggcttccgtaaagacagcctacggacgttgtggcgaggaatctacgttcacggtagctgccttgcgttcggtaggtattcctgcccgtcaggtatatacgccgcgttgggcacataccgacgacaatcatgcctgggtggaagcttgggtagatggcaaatggtacttcctgggtgcttgcgagcccgaaccggtactgaatctgggttggttcaacgctcccgcttcacggggtatgctgatgcacaccaaggtgttcggacgttataacggaccggaagaagtgatgtaccgcactccccgttatacggaaatcaatgtgattgacaactatgctcccacggcaaaagccgatgtgaccatcgtggatgcggacggcaaaccggtggctgacgccaaagtggaattcaaagtgtataactatgccgaattttataccgtagcttccaaacagacggatgcggacggtaagacgttcctgaccgccggaaaaggggatatgctggtatgggcttccaaagatggaaaattcggttattccaaactgtctttcggacaggacaatgccttgaccgtgaagctggacaaaacggccggcgaggcttatacactggatatggatatcattcctccgatggaaggcgccaatatgcccgaagtgactcccgaacaacgtgcggagaacaatcgccgcatggctttggaggactctatccgcaatgcctacgtggctacattcatgacggatgaatcggctcgcaatttcgctaaagaataccagctggatgaggatgccgttgccaaattgctggtggcatcacgtggcaactacgaaaccatccgtgactttatggcccgtctccgttcggacaagtcaaagaagggcggcattgacctgcttcagcagatttctgccaaagaccttcgtgatgtaagctccgaagtgttgatagaccacatgatgaattcacacttgtgcgccaatgctgattatttccgcagatttgtgcgtaatccgcgcgtgagcaacgaaatgattactccgtataaagggttctttgagaaagcagtgcccgaacaggatcgtgaggcttaccttgccgatccgatgaagctggttgcatgggttgccgggaatatccgtgtggacaaggattgcaacctgggcggctcgccaatcactccggaaggggtgtggaaggcccgtacagccgatgcgcacagccgtgatatcttctttgtatccatggcacgcagcatgggtattcctgcacgtatagacgaagtgacgggaaaagtgcagttgataggcgatgaaggtgctattgatgtgaatttcgaagcaatggaacaggccagtgcacttaccggcaagtttattgccagatatacgccgatcaagtctttggctgatccgaagtattattctcatttctctatttccagactgactcctgccggaactttgaaattgctgaattatgatgaaggcgatattgatatgggtggcggcgctacttgggctaatctgttgaagaacggaacggcactggatgccggcaattatgtgatggtgaccggtactcgtctggctaacggcggcgtattgtcccagctgactttctttaccatcaagccgggagaaacgactacggtggacttggtgatgcgtgaaagtaaggatgatattcaggtgatcggtaatttcaattcagaatctacttataaaccgatggatagcgatgaactgaagtccattcttgccactacaggacgtggttactacattgtagccgtactgggcgccggacaagaacctaccaaccatgcattgcgcgatattgcggcattgggcaaggactttgatgaatggggcagaggaatcgtgctgttgttccccaatgaggagcagtacaagaagttccgtccgcaggaattcccgggattaccggctaccattacttacggtattgatgtggacggttccatccagaagcagattgcagaaggcatgaagttgtctaacaagactatcttgcctatgtttatcattggtgatacctttaaccgggtggtattcgtgtcacaaggatataccatcgggctgggtgagcagctgatgaaggtgatacataagttgtagaatccggtataaacaaaaagtaacgcggatattcagcttgaaaccctgaatatccgcgtttaatatgataataacgtttatgcttgcttattacttgtcatcatccaaatcatcatcgtcatcgtcccagtcatcctctttctttgatttcttggggttgaggcttttgtttttcttttccagtgctttgtcgttttcgtctttcaatgccagttcggacaaggcggcttttactttgttggggtcagtaacatccttcagatactcttctatctttacagtacctcccatagatacttttgagttacgataaatcatgccgctgtctacgctgctccgtccggagaaatgaaattccgaagttccggtttcttcggcaatcttacggatattaccggcattcacaccgcatcccggcatgatgatgattcgtccgtcggccagttctaccaattcttttaaaagagggatacccttttcggcggtcgcttcttgtccggaagtaaggacccggtcgatacccaggccgataatctgttccaaggcctccttgggattgctgcacatatcaaaagcgcggtggaaggtgacactcatctcgcctaccgcattcatcagtttctgcatcaagggtacatcgacattgccttctgcggtaagacatccgaacaccacaccgtccgcacccaactgacgtgccactttaatatcatgcaacatgatttcttgctcgatgggagaatataggaaatctccgccacggggacggataatgacatgtagttttgtttggttcaataattggcgtgccatacggatttcgccaaaagacggggttgttccgccttccggaatacctgcacatagttctacacgataagcaccggcttgttgtgccttcacagcactttccacggagttggcgcaaatctcgatttttgatttgttactcataaagttatttaatagttaattcaatcacataactaacgtcatcgggcgctttgggctgtttcagcaattttctttcaatctctccgctaggggaccataaatggtttctctgcatgagttcatccattggcccagttctttacggatgactttgttcttcataatatatgaatttgtctgtgcaaagataggcataatgtaagagtgtgagaaatatttagcggaaaatttttttagttaaaaagccggtacttctctcggggtgagagaaatatcggctttctgtcagaatagaatatattattgcacgtggatgcggtgcccgttgaatacgttcatgcccagtttgttcataatatatttgatggcaagctgcgcttttacggagttgccggcatcgtccaaaggaggcgcgaaggccgaaatacccattacacccggcatcacacccatcacaccgcctcctacgccggtcttggcagggattcctgaggtataaagccagtcgcctgtgtgctggtagaaacctacggtagctatcatggaggtgattttcggggcgagggccttgtcgaacacttgtttgttcgtattcgggttcaatccttcgttggcgatggtggctccgcagatggacaattgttccgcggtgatgcccatagagcactgacgggtgtagaggtcaagcgacatatcaggatcatcgtagatacggttataatttttcaataaccaggcgatggaacgattgttgaaatttgttgcagactccgatttgtacaattcgtcaatcagttgcggggcacttccgcatagttcggtcatattgtctacgatggctttccacttgccgtcgctgttgcctaggggttgtaccatgctgtctgccgagatggccccggcgtttaccagtggggtggaagggtggtcgttttccaacaggatagccatgatggagttgaacggcagtccggtagcgtcggcgccaatcatttcgagcaccttgggggcgccgtattggcggagtaccaggatggcggtcagcaccttggaaacggactcgataccgaaacggtactgagagtcacccagttggatgatttctccgttcatcagacagatactgattccgaacagtttgggatcaatatttgccagataaggaatgtagtcggcgttcttaccgtctgtattgtctttatacagattgtaggcctcttgtgcagcatcctttatttgctggatagttatagttctttccataaattaatttgattgaagtaaccatccaccttaacggcggatggttgcattattgttatttatgcttattttttagcggcgttgctatgggcattgtgagtaaacacagtaccttttacagcgatattcttgtcttgggcgatgcgggtaggagtgggatattccagtttctcgaactcgctgatggcattcttgatgtcgttcaacaacatatccgccatgtcacggctgaatccctgacgtaccacaacacgcataaccacataattttgaatgttttccggcaaggtgtaggcaggaaccatccatccgctttgttgtaatttagcctgtaaatcgtacagagtccatttggcattctttgcgtattcgggtttcatgtaccagatgaacaaaggatttaccactttgtcgctgtagtttacgaacggagccatcttggctatttcgctgtgaatgtacttggtgatttccatggaattgtattggatggctttgtatccttggaatcccagacggataaactgatagtattggcctagaatctgtgcggcggggcggctgaagttcaaaccaacctgtgtgatgttcgcacccagataattgacactgaatgacatggcatccggaaggtatttcttgtctttccatactacccatcccagtcccggataaaccagtccgaacttgtggccggaagtgctgatggaaagaacccatttcaaacggaagtcccatttcgtttcggggctgaggaacggcaggatgaagccaccggttgcggcatctacgtggataggaatttcataacctgtcttggcgttgtaggcatccagcgctttgtccaatgcttccacgtcatcgttcagacctgtccatgtcacaccttggataggaacaatacagatggtgttctcgtcacacatctttaaggcttcttcggggtccagggtggtcttgtccagagtaagaggtacttggcgcatctcaatctgccaaagttgggcgaatttctcccatacaacctggaaaccgcttgaaatgacgaagttaggtttgtcggtcggtttgccctgggctttacgcctgtctctccagcgcaaccaggcagctacaccacccagcatacaagcctcgctggagccgatggccaacgctcctgatttccattttgcctgttcgggggaattccataggttggccatgatgttgatacatttggcattcatcacggcgatacgcgggtactctgtttcatcaatatagttgatgttgatagcttcgttcatcaatttggtagcataatcgtccatataggtggtaacgaaagtagccagattaagacgaggctgggtttgggcgaatgtttcgtctttaaccatttgataagcaatctgcggagtggtaggttccatgggaatggtgtctaccggagcaggttgcagcatttcgtttgaaccaaacacggctgtttttgcgtcaccgtctcttaaatcacaattacaatctttcatttttacttaaagtttaggttagtaatacaatgaagaacgtgggagtttcccgcgtttttctccctcaacataggggttggtgaaaagttccttgattttatgttttttaatgtaagtagggggaatacaaaaaaacgatgggaatcattgtactatgaacgaaaaagagatacctttgtttatacataaaatcattggatgcccgtatccgatattttaggggtatgtaattaaacaataagaaggaaatatgaagaagcgttatcccatcggcattcagaattttgataaactgcgtttaggaaattaacataggcgtaaactttgacactacccggcataatattttggaatggaaagtaaaggaataaacgatatgtcgctttgaaccaaacgtcttttgccttgttgtgtatctcatacaataaattactacaagtatgaaagtacagacagggcaggggactattcccctcattactttaataggtatattttccatttcggcattaaatgcattgccgggattggcggtttctcccattttgggcgatttgaataaaatctttccgtctgctacagacttggaaatccagatgctgtcctcgttgccgtcacttcttattattccttttatcttgttgtcgggtaagctgacagagaaagtgaacaacctcttgctgctgcaaatcggcctgaccatctttggggtgagtggtatcctttatctgctctccaataagatgtggcaactgatagccatcagcgccatgttggggatagggtccgggttgattgttccgctttccaccggattgatatcccgttattttgtgggagcttaccgtacgaaacagttcggttacagttctgccataaccaatatcaccttggtactggccactacattgactggctatctggcggaagtgaactggcatttgccgtttttggtttatctgtttccttttatatccatttttcttactcattatctgaagaaagacctctccagctatcatccgtctgatgatattccgtctgataccgccaaagaaatgggcaagaggggaatgaatgtcaaggccttaatcaagctgatggctttttacggtttggctacttatctggtaatcattatcagtttcaaccttccttttctgatggaagagtacgggctttccagtggcagggcaggaatattgatttccttgtttttccttgctatcatggcgccgggctttgtgctgaacaggatagtgcaaatgttggggcgtcgcatctatatggtttgtttgttgatgatagcttgtgggatgggaattattttgctcagccgttctgagatattgattgctttggggtgtgtcctgaacggtctttcatacggtatcatccagccgttgatttatgataagacctctgatgtggccgtacctcataaggtgacattggcacttgcctttgtgatggctatgaattatgtggctatcctgctttgtccttttattgtagatgcttttcagaatctgttccattctcattcgcaaacctttgctttctggcttaatctgatggtagccttgatgggtatgtttattgtgatgaagcaggaaaaactgagtttataagaaaaatacccacgtaataacagcatgaagtatgaataaacaagttgaagcaaaccttagcatggttgtctccaaagcgttgggaggccttaatatgaacgcattgaaatatcttttacctttgtggatagctcctgtgacaggggttactttccgattggtatttggggctgccgctttttggcttatcgatatattttgtaaacccgaaggctccactacccgtcagaaatggcagctttttatgttaggggctttaggtatttacggatatatgtttttttatctgctgggtatcagtaagaccactccggtttccagttccatttttgtcagtttggagcctatatgggtattcattattgctgtattgttttataaggaaaaagtaacttggatgaaagtgcttggtattggaatggggttgggaggagctattctttgcatttctacgcaacctagtgacgatcttgcctctaatgctccgttaggtaatttaatgtgtttggtcagttcgctggtttatgccatctatcttgttctcagcaatcgtctgttaaaaggggtgggaaatatgacgatgttgaaatatacctttttaggggcggctgtcatggctgttattgtcaatacaatttacggctttgatgctcctatactgagaatgtcacttttctctactcctatgttggtcttgctttttgttttggtattccctaccactattagttatttactacttcccctcgggttgaaatatctgaaaactacattggtagctatttatggatatttaattttgattgttgccacggtgacctcttttattttggggcaggatcgcttctcatggacgcagttggcggcgattgttcttatttgtgccagtgtttatctggtagaggtggccgagagtaaaagtgaaaaacagattatatcgaaatccagataagacaccgggaaaaaagtataagaccctaagaaaaaaattatcgcggtgtgtaatgtaaagaaacttaccggcaaatgaatgagcgaaaaaaaagaatgcaactttacatcgaaagcgagtgtaaggaatcaattttatttgtagctttgcacccaattaaaaaacaagagtgttatacctatgctacaattagatgcaatatacaaggcggctcatgtcctgaaagaggttgtccgtcgcactgatttgatttatgctcctcagataaatcctgagagtacagtttatctgaagcccgaaaacctgcaattcacaggatcgtttaaagtgcgtggtgcttattacaagatttcccaattatctgatgaagaaaaggcgagaggtgtgatagcctgttctgccggtaatcatgcgcaaggggtggcattggctgccactaagtgtggcatcaagtcgttgatttgtcttccagagggagcacctatatctaaagttgaggctacgaagcattatggggcggaagtttgtttggttccgggagtctatgatgatgcttatcagaaagctctgcaattacgtgatgaaaagggatatacttttgttcatccctttgatgacgagaatgtgatagccggacaaggtactatcggtttggagttattggaggaaatgccggatgtggaggtagtcattgtccccattggtgggggcggactgatttcgggagtggcttatgcgttgaaggctttgaaaccgtctgtcaaggtatatggtgtacaggcgttgggtgcggccagtatggcaaattctattcttcattcgcgtattgagcgtcttcactctgtttccacttttgccgatggaatcgcggtgaaagagccgggaacaaatacttttgacttggttaatcagtatgtggacggaattgtaactgtgaccgaggatgagattgccgcagctattctggcattgatagaacgccagcggattgttgcagagggggcgggagctgtgtccgttgctgcagccatgttcaataaggtaccggtaaagggtaagaaaactgtttgcctggtgtctggaggtaatattgatgtgacgatattgagccgtgtcatcagtcgcggtatggcaaagtcgggacgtacctatgcagtaactttggacttgatagacaaaccggggcagctgttgggagtcagcaaaattatcgcagagcagggaggaaatgtaatttctgtacatcatgagcgaaatagtgagagtgcagatgtcaccggatgtgcccttcgtgtcgttatggaaaccagaaacgaggaacatatagcatccattcgtcaaaaactcttggatgcaggctatgtgataatgaaataaattatatactttacaagtagaaaggggggaatttaaaattttcctccctttcttgtttctaattttaatttctccacacaaaaaatcgatttttatagtgaaaatatcattttatacttcttagaatccaattaaaatcgtacatttgtcgcagttttgtaatgtagagtttgcaaaaatgaccgatataatcaaacatcgtggtattgtggaaaacattgaaggttctcatgtgcgggtgagaatcgtacaaacttctgcctgttcggcttgtagtgtgaaagggcattgcaatgcatctgaaagtaaagagaaactgattgatgtttttgacatgaaggcatcttcttaccgcataggtgaggaggtgatgatttatggtaccacttccatggggatgcaagccgtattgctggcttttggtatccctttcttggtattgctgattactttatttatttccatgcgttttacggggggggatgagttaaggtcggcgcttgttgctttgtcagccttgctcccgtattaccttatcatatatgtatgcaggaataagttgagcaagaagttttcatttacgcttgaaccaataaaaaataattaataaataactaactaaaatttatggatttaattctggttgcagtaatttcgttgggagcgattggcttgattgccgcggtaatcttgtatgccgcttctaagaagtttgctgtgtatgaagatccgcggattgccaaggtgagcgaagtgcttcctcaggcgaattgcggtggatgtggttatcccggttgctctggttttgctggtgcctgcgtgaaggctgccgatgccggttcgctggagggtaagttatgtccggttggtggtgctccggtaatggagaaagtagctgccattttgggattggaagccgttgctgccgaaccgaaagttgcggtggtaagatgtaacggtagttgtgaaaatcgccctcgtactgctctgtatgacggagctaaatcgtgtgccatcgctcatgccacttcaggtggtgagacgggttgtacattcggttgtctgggttgtggtgattgtgtggaagtgtgtcagtttgatgctattcacatgaatcctgaaaccggccttccggaagtggacgaagaaaaatgtacagcttgtggggcttgtagcaaagcttgtccgcgtaagatcattgaaattcgtccgaaaggaaagaacaaccgccgcgtagtggtgatgtgtgtgaacaaggataagggagctgttgccaacaaggcttgcaaggctagttgtattggttgtggaaagtgtgtgaaagtgtgtccgttcgaagccattacgttagagaataatttggcatacattgatccggctaagtgtaaatcttgccgtaaatgtgaatcggaatgtccgaaaggggctatccaagctattaatttcccgccacgtaaaccgaaggtagaagtgccggctggtgaggctgctgcaaaacctgctgcaaaagtagaggcttcaaaggtggaaactccggaagcggtgaaagctgacgctccgaaagcggaagcataatcaaaattcaaagtaagtaaaaattaaaaagatataacagtgaagacatttagaattggtggagtacatccagcagaaaataaattgtcagcaggcaaagccattgaaacccttgcacttcctaagcaagcggtatttcctttgtcacagcatatcggtgctcctgctactgccatcgtgaaaaaaggcgatgtggtgaaggtaggtacgaagattgctgaggcgggtggctttgtttcagcagccatcttctcgtctgtatccggtaaagtgaacaaggtagacgccgtaatcgatgcaagcggttaccgcaagccggctatctttatcgatgtggatggtgacgaatgggaagaatcaatagaccgcagttcgacattggtgaaagagtgtgctctcacacccgaagaaatcgttgctaaagtgaaaaatgcaggtgtagtaggtatgggcggtgcttgtttccctactcatgtgaaactttctcctcctccgggctgcaaggcggaatgtgtaattatcaatgctgtagagtgtgagccttacctcactgccgaccatcgtttgatgttggaaaaggcagacgaagtactggtgggcgtaagcattctgatgaaagctgcaaaagtaaccaagggatatatcggtattgaaaataataaaccggatgctattaagttgatgactgaaaaagctgctcaatatcccggtatagaggtggttcccttgcaggtgaaatatccgcaaggtggtgagaaacaattgatagatgctgtgatcggtcgccaggttcctgctcctcccgctattcctatcaatgtgggtgcggtagttcagaatgtaggtactgcatttgccgtttatgaggccgttcagaaaaacaaacctttgtttgaacgcattgtaaccgttacaggtaagtctgtcagaaatccatctaattttctcacccgtatggggactccgatgagccagctgattgatgcggctggcggtttgcccgaagatacgggaaaagtgattggtggtggtccgatgatgggtaaagcactggttaatacagaagttcctatttgtaaaggtagttcgggtgtgctgattatgaatgataaggaagctgcccgtgcggaagctcagccctgtatccgctgtgccaagtgtgttaacgtgtgtcccatgggactggagcctttcttattggcaacactttcagctcataaggattgggagagagtagagaaagaagatgtaatgtcgtgcatcgagtgcggttcgtgtcagtttacatgtccgtctcatcgttatttgctggactatatccgtttgggtaagggcacagtaggcggtattatccgtgcacgtaatgctaaaaaataattcgacaaaatagtatggctaataaattaatagtatcattatcgcctcacgttcatagcggtgacagcatacagaagaatatgtatggtgtactcattgcgttgatacctgcgttgctggtgtcattttatatgttcggactgggcgccgtggtggtgaccttgacctcggttgccgcttgtgtattcttcgaatgggcgattaccaagtttattttgaagagagaacgctctaccatctgtgatggttcggctattataaccggtgtgttgctggcattcaatctgccttccaacttgccgctttggattattatcatcggtgcgttggtggcaatcggtgtgggcaagatgactttcggcggattgggttgtaatccttttaatcctgcgttggtaggtcgtatcttcttgctgatttcttttcctgtgcagatgacttcatggccgttggttcaacaatggggaagttataccgatgctgaaaccggtgctactccgctggcattgatgaaaatggctgtaaagggtgatgtaaatgctttaggtcagttgcccgatacattaagtctgtttctgggtaataacccgggttcgctaggtgaggtgagtgcattggctttattgcttggcctgggatatatgctatggaaaaagattatttcctggcatattcctgtatctattctggtgactgtatttgtatttgccggtctgatgcatttggttgatccggtggcttacgcatctccgttggctcacttgtttacaggtggtttgatgttgggtgctattttcatggcaaccgactatgttacttcgcctatgactcataaaggtatgattatatacggtgtggctatcggtttcctgaccgtggttatccgtttgttcggtgcatatcccgaaggtatgtctttcgctatattcattatgaacgcatttactccgttaatcaatacttattgtaaacctaaaagattcggggaggtcgtgaagaaatgaaaaaactagaatcatctttgaaaaacatggttatcgtgctgacagcgattactgtgattgcaaccggacttttggcttatgtcaaccaactgactgccggtcctattgctgaggctaatgcaaaagctttgagtgacgctattgcagttgtagttccggggtttgataacaatcctgcggaagctcctgaaactatagaattggatggtgctacttataaaatatataaggcaaccaagggtggcgaatttattggtgctgccgtagaatcttctgccaatggttttggtggcgctttgagtgtgctggtaggttttgacaaagagggaaatatcatagactattctttgttgagccatgctgagactccgggcttggggtcaaaggcggctgattggtttaagaaaggtgcaaaaggcgacattaccggtatgaatccgggacagggagcattggtggtaaataaggatggtggtcagatagatgctatcacagcttctaccatcactacacgtgcttttctaaaagctgtgaacaatgcttatgcagcatatagtggtcagaatgtggatggcgctagtggtgcaactcagcaagtgtctgaaactgttgccgaaaatgctactgcctgcgatgctcaatgtgaaggaaacgaggcatgtaagcaggtttgtgactctacagcctgcaagactgtttgtagcgataaatgtgatcctgctaactgcgataaggcagactgcaaaaaagtagaatgtcccaagcaagattgtaaaaataaaaaataaggaaggagcagactatgaataattttaaagtattgatgaacgggattgtaaaagagaatcccacgtttgtactccttttgggtatgtgtcctacattaggaacaacatcttctgccatcaatggtatggggatgggattggctacggcttttgtattaatctgttctaatgttgtaatttcggccattaagaatttgatacctgatatggtgcgcattccggcctttgttgtggttattgcatcattcgtaaccttgttgcagatgattatgcaggcatatgtgccggcactttatgctactttgggcttgttcatcccattgatcgtagtaaactgtattctgctgggacgtgccgaagcttttgcagcaaagaacggtcccgtgccttcattcttcgatggactgggtatggggctcggatttactcttgcattgactatccttggtggtgtacgtgagttcctaggcacaggcaagttgtttgatatcactatcatgcctgagcaatacggaatgttgattttcgttctcgcaccgggagccttcattgcattgggataccttattgcgattgtgaataaactgaagaaagcataacccgtaaaaagtaagaatatggaatatatattgatatttatcaccgctatatttgtgaacaacattgtgttgtcacaattcttgggtatctgcccgttcctcggtgtatccaaaaaagttgagacagctacgggtatgggtgcggctgttgcattcgtgcttaccatcgctaccattgttacctatcttatccagaaatttgtactcgatgctttcgggttggaatatttgcagaccattgcgtttatccttgtcattgcagcattggtacagatggtggaaatcatattgaagaaagtgtctcctgccctttatcaggcattaggagtattccttccgttgataaccactaactgctgtattttgggtgtagctatcttggtcattcagaaagattttgatttgttgactggcgtggtttacgccttctctacagctcttggttttgctttggctatggtattgtttgcaggtatccgtgaacaattaagtttggtgaatatacctaaaggaatgcagggaatggctatcgcattggttactgccggtctgctggcaatggcattcatgggattttcaggtgtagacaaaggtttgggtgttctgtttggaatagaatagttcacttcatcgttaaaataaaccgattcagaagtccggagcacagcttcggacttttttattagaaagaaatccattgttcttgtccgtaaattcaatttttatgcttatttttgcattagaattaatagagagattaaatggctatgaccttgattgtactcgcggccactatggggaataaatatggtggattgaaacagctggagggaataggtcctaatggcgaaacaatattagatttttccatatatgatgccgtaagagtcggatttgataagatcgtatttgtcataagcagacattttgaacaagaattcaagaaactggtatcaggcaaatatgaacatgtggtagaagtggagtatgtttatcaggatgtggaaacgattcctgaagaaaagcgtaatccgaaacgcaaagcactgtacggctcggtaagagctgttttgatgggagaagagttgattgactctccattcggtgtgataaatgccgtgaacttttaccaaagagaaagttttgaattgttatatgataatctggtgatgttgggagaagctgactaccatagtttcaatatttgctacaggctgagaaatgtattggcggaaagcggaggggttacccgtggtatttgtgaagtggatgaaaagggatatctgttgtccgttacagaccgtgtaggagtagaacggataagtggaaatccgatgtatcctaatgaattacataaatgggtagctttggatgacaacagcttggtttcaatgaatatgtggggatttactccgcaggtatttggtgagatgaagaaggcgttcgataagtttatagatgagaatggaatggatatgaaagctcattattctattccggcttttatgaatgagcgtattgctgacggagtcagggtgaaagtgattgagacacctgccagatggatggggttggtatcgcatgatgacaagatacaagtcctgcttcgtatcaatgatatgatacgaaaagggatttacccgtcgaagttgttttgaacctattagaaaacgacagaatattaagtattatgaaagaaagaattttagtaacaggaggaaccggctacatcggttctcatacggtagtagagctgcaaaatagcggttacgacgtagtgattgtggacaatttgtccaattcaagcgccgatgtggtagataatatagaaaaggtttcaggaatccgtcctgcatttgaaaagttggattgcttggattttgagggaatggacaagctgtttactaaatatccgggcataaaaggtattattcattttgcggctagcaaggctgtgggtgaatcggtacaaaaaccgttgttgtattatcgcaataacttggtttcattgattaacctgttggagttaatgccgaaacatggagtagaaggtattattttttcatcatcatgtacggtgtatggtcagcccgatgttcttcctgtaacggaagaggctccgattaagaaggctgagtctccgtatggtaatacaaaacagatcaatgaagaaattattcgtgatacagttgcttcgggatcgcctattaatgctattatgttgcgttactttaatcctattggcgcacatcccactgcattaataggtgaattacctaatggtgttccacaaaacttgttaccctacgttactcagacagcaatgggtattcgtgaaaaactgagtgtgtttggggatgattatgatacaccggacggttcttgcatccgtgactatatatatgtagtggatttggcgaaggctcacgttatcgcaatggatcgcattttgaataacaagcagaaggagaaggtggaagtctttaatattggaacgggtaaaggcgtttctgtattggaactgatcaatacatttgaaaaagctaccggtgtgaaacttaattatcagatcgtgggtcgtcgtgccggagatattgagaaggtatgggctaatcctgacttcgctaataaggagttgggatggaaggcagaagccaatttggaggacacgctacgttcggcttggaactggcagttgaagctaagagaaagaggaattcaataaaaattaagatatttttagaaagaccgatgaacaaaggacgctagtgtggcgttttatagatgcaaataacctgaaacccctcttggatatgtgaatacctgattggcggtagttatgttactcaaaacatagagcaggctaaaaaattgcatagtagttttgtcgtgttttattttgtgtttgtgttgtggctgttctccgacgtgagtcgggggacagttttttttgactatttagttgttttttagttatttatggctatatttgtcggaaataatcacgcactactttatgaaaacaaaattttggatcatctgcttatcagttttctttgtgtcttgcttgcgtaatatgcatgatatatacacggggggaggggaagaaggggaggaaaaaatcaataaagacgatttttttgattttactactgtccgtaatagtcaacttattattgattatggtatgaaagtacagactgctttttatctgtatgatgaatatcctatggaattagttgaaaatacttgggagtttaaagatataaatcccatttatgctgcttcgactgatatgaatggtagatttttttcaaaagtatctttgccggcttatttgaaaaaggtatggctggtaactgataatgtgttggtcgtatcacctgttgaattggaattactatctgacggactaacctttaattatgttgattataaggcacaactgtctgccgatgggcgttctagagcagtaatgggaggagtgagttatcctgacggatatgatgtattgggtaattggaatgaaaatggggttcctgattatttgttgcctgaaaagttggatatacctggtgcttttttagagagatgcagtaatttaagccgttctatagtagtagataatcgtaatttgttggaaagatttccggaactgcgtacttcagggagtaatgatatggtaataactaaatctacaggtttggtagcgacttattttaatttctcgtctactacgtgggaggatatggttgcttattatacttataaagaaggagagtccgtggacatggctaccataaaaaagaccatcctgattcctcgttccagtaggaatgctcctaaatctttagtcggtgagcaaataaaactaaaatattggaataaggaacaaagcaagtatgaagatgaattcccccaaggcactcatattggatggattttattgggaatgggatttggaaaagaaaagggtgtttttcctcgttattctaatcctgcatataacgataataaagagcaacgttcagttttgttaagtgatccggaactggacaattgtttctttatggctatggaagataatgtggacatgcgttttaatgatgtacagtttgctattatggcatctgcttctttttctgtagaacctactcctaatataccggatgaagtaaataagggtgaaatttcgtatgtagtcaaagggtctttggcttatgaggacaattggcctgataagaatgattatgatatgaatgatgttgtgatatattattccagtacagttgtgaaagataaatcttctaacgcattggtgcgcaccactactacttttactccgatgaatgatggtgctacttatacaaatgggtttggtttccagttggattacgtagggaaggagcatatcgatttggtgcaggtgagtcaagaaggtaatgtgatcggaaaaaactttgagccgggaatagaaaagcctgtattaatacttttttctgatataaagcctgttctcaaaaagcctgtgactgtagtgatcggatttaaaaaatatgataaagtaagcgatatggatgcttatccgccttacaattctttcatttttgtgaataaacgttctcatgaagtacatttgtcaggctataagccgacaagcgtagctgatgagagtttacgtggtacgggtagtgatttgagtcaagattccaatggttccccaatgtattatatagcagaagataatatgcctttcgctataaatatcagtaacagtgaatttagatggccttcagagaaggtgtctattaccacctattatcccgagtttaaacagtggagagattcttttggtgcggattataaagattggtatttacaccccaaagaataataaagggtgaaaagtactgttgtttttgataaatcagattaacaggactttttacttgaaaaaatgtcaccttttgaagccaagtgattcaatctttttgtacttttgcggacaatatgattttataaaggaaaactcacatggattcagtctttattacgacgcgtaagcaacgggttatcagagaactaagggattatatgttgattgctcttggtatgctgatgtatgctatcggatggaccgtctttttgttacctaatgaccttccttcaggtgcggtgccaggtattgcttctattgtttattgggctaccggtttgccggtccagtacacctatttgggaataaacggagtattgttgatactttctttggttattttgggatggaagtttagtgtgaaaaccatctatgctgtatttgtgctgacttctattttgcctatcatacaggatttgacagggggagagtctttaatacatgatcaacctttcatggcttgtgtcttgggagcctttttctgcggaggtggtattggtgtcgctttttctgccaatggtagcacaggaggtacggatattatagctgctattgtcaataagtatcgtgatattactttgggccgggttattttgatgtgtgatttggttattatctcttccagttattttgtattgcatgattgggagaaggtggtatatggatatgttgtcttgtttatatccagctttgtcttggatcaggtggtaaatagtgctcgtcagtcagtgcaattctttatcatttcgaagaagcatgaagaaatagggcatcgcataaataaagatcttcatcgaggggtgacgttcattgacggagtaggttgttataccggtgcgggtgtgaaaatgatgtttgtgcttgcaaaaaaacgtgagtctactactatattccgtttgataaaagatatcgatccgaacgcatttgtatcacaaagtgctgtcattggtgtatttggagaaggctttgatagaataaaggtgaaataagagttccgaagttaaaaaatagaataagggcgttctgaatggacgcctttttttatgtctgttttttgaatgaacttcaaatgatataagactttgttaactgagtaaactttcataatgtaagtttgttgtctgttttgcagcaataaacatgtataaaataatattttaaaattatatcagattatattttgatatcaaaatgttagtttatacctttgctatataaaataagaaatgataaactaataaataacctgatcatggaaacaaaacttacagaagaaacccgagtagaaagtgatttaattggtgcccgcgaaattccggccagtgcattgtatggtgtgcaaactctaagaggcatagaaaatttcccaattagtaaatttcatctaaatgaatatccgttgtttattaacggtcttgccattacgaaaatggcagctgcaatggctaactatgagttaggtttattaactaaagaacaaaaagatgccatagtattggcgtgtcaggaaatcttaaatggtgagcatcatgagcaattcccggtggatatgattcagggaggtgccggtacttctaccaatatgaatgctaatgaagtcattgctaaccgtgctttggagattatgggacacaaacgtggcgagtatcaatattgctctcctaatgaccatgtgaactgctcacaatcaacgaatgatgcttatcccactgcaatccatattggtatgtattattctcatcttcgttttcttccttatttggaatcgctgattggtgcattccataagaaaggagaagagtttgcacatatcatcaaaatggggcgtactcagttggaagatgccgtacctatgactttaggtcagacattcaatggttttgccagtatattgagagacgaaattcgtcatttgaatgaagcggcggcagacttcctgacagtaaatatgggtgctaccgctattggtacaggcatttgtgcggaaccgggatatgcagaaaaatgtgtggaagcattgtgtgaaattacaggttttgatttcaaattgtcgtcagatttggtaggagctacttcagatacttcctgcttggtaggttatgcttcagctttaaaaagggtagccgtaaaagtaaataaaatatgtaatgatttacgtttgctggccagtggaccgcgttgtggtttaggagaattcaaccttccggctatgcaaccgggatcttctataatgccaggtaaggtgaatccggtgattcctgaagtgatgaatcagatttgttataaagtaataggtaacgaactatgcgtgactatggctggcgaagctgctcaaatggaactgaatgctatggaaccggtgatggcacagtgttgttttgaatctgtagatttaatggtcaatggttttgaaaccctgcgtacacgttgtgtagaaggtattactgctaatgcggaacgctgcaagattgaagtgcataacagtattggtgtagtaaccgcattgaatccgattattggttataaaaattctacaaagattgcaaaagaagcgttggaaacaggtagaagtgtctatgaactggtcttggaacatggtattttaaataaggaagagttggatacaattctaagtccggagaacatgttgaaaccggtaaaattggatattaagcctagaagataaatttatttcaccacagactacaggaaagtaaagaacttgttttatgaagccggcttcaatatttgtaaagccggctccatgagtggtggcactagttttattcctgccgataaattaatttctagaaatccggcatagtgttttgtcaccgctatagcgtataaattgttttttcatattttatcagcagatagtttgcgtagtctgtggtatacttttttagaactttctgaatgtgaggcgtgcataatcagatttcagaattagtttcttgcctgttgctttttccactttaagatgattaatagcttgattaagtccgaaaggtttcaattcattcagtgtcgttagtttttcttcatctccccggtggcggaattcactcatggttacctcatctcctttataagagaaacgtccgatatgagtgcctccatttccacctttggcactgatttccaccaaatgtaactggatactataataaatgcggttacattcttctatttttccattagtatattctatagtcattaattgccatctgccatctaatttgccattgatgggagctttgtcacaactgctgattcccagcataaagagtatgaataataatatttgtttcatatgttgattgggttgacagttaaaacttttatttattgcctgatttgataattccttgtttgcggataaccagcattccaccataattatttccaagcatgctgccgcgatccatagctccggatacagtgaaactccatcctttcagttgttgtggagcataagttacttcaaacaaagagttgaattgtttctttatttcattcagaggattatcataagtaccccaatgacgggagtaggagagtagcatacgataactcagcgattggcagggggaaccgcagaatcctatgtgatgtgccagtacacggttgctgataaaagtaatctgtccattcttgttgtaaataggtccgggaagtagaggattgcctattcccattccccaatgctgccatccttgatagaggtaatgattgtaataattatctttagcactgatttgctcttcaaactccccccaaaaggaatcatacagcataggtccggtttgatcctttgttcctaatccttcgtatacaaaagtatcaatgaagcggttttttggaaaagttatttccagtccgatgtgtccgtctttccagcgtccgtattggaaaaacatttgggagtgatcgtcgaaataatgttcataatagatttttaccttccactggttaagataagctgttgcggcaaaattccaactaccgacatggtttccgtagatgtttacttgttcgccttcgggtgtggtatcatctccagccataggaaccaatacgcgcataaagtcaacaaaccgggtaggcatatctattacaggctctttttgtcctgcaatatattggtctccgccgaattgagcggacatttgtattcctccttcaaattctaccggaaaatgttctttgtttcctactttggcgaaaagcgatttactgtggtaaagtacatcaatggcatatttgttacctatggaagtgaaatgttcctgccatttgtcatcagtaaaacgtccataggctatgtgtcctttcaaataaagccatttatgggtacctggtatggctacataatagggaacttccaagcgtacttggggaatggggcgggcattatttgattctaccatgcctccactgcttaacttggaattctttaattcgggcaagcgttctttactgccgatgctcaggttcaaccatcggtagctaaggtctgcataggcctgttggatgatgaatgaggaggtgaaattgtaggcggttgccaaatccagtcctgcactgaagccgaaatgttggtttaatggcattgtgtgtgcaattcctgcccgtaaataaccattttcagtattgacagaagataaaccttgcctattggcagtaagccacataggtgcgtaagttcctttacccgatgttcctcccatctcaacggtatattctgttttgacagggaattgggcattgatgtgctgcgtaatggatattaacagaaatagtaataagaatagttgtattttcttcatttagtttatgtgttttggtttagtgtaaagtttgctaaaacgaagcagatttatcagtctgccatcctgaacttttgtgaaagatttggtttctaatcactttatgtatatgaaaagcttcactaatgcccagaatggcaaactatataatcatatcagcaaaagttttggcatatttattttcctccggcaggcaggtttttcaaccagtaatcagccattgtctttcgcagatgcaagctggttccctcgccttcataaattccatgggaacgcatagggtaagaaatctgtgagaagatctttccgtgccgtaccagttcattgaccaacatttcacaattctggtaatggacattatcatctcctgtaccgtgaattaacagcaagttgcctttcaatcctgctgcatacgagatgggagaccctttgcggtaaccctccggattattttgaggggtgttcatgtaacgttcttgataaatcgtgtcatacagacgctggtctgctacaaaagcaatggcaatgcctgtgtggaaaacatcgggataacggaacatactattcagagtctggctgcctccaccactccagccggtgataccgatacgtgtggtgtcaatgaaagagtattgacgtgccaagtcttggatgcctcttgcctgatcttcactggcaaaggttccgacttctccataaatacatttgcgccattcgcgtccacggggtgcattggcaccacggttctcgatgctgactatgatataccccaggtttgccaagtattggtgccataaacttcctccgctccatacatcctgtacagtggcgttggcaggttctccatagacatcaattatgaccggatattttttgctgggatcaaagtttacgggtttgatcatccatgcatccagttccaattctcctgaacgggtttttacaaattcttttggttgtagccccaaggctttgtattgctccttggcttttgcattgtcagtaatcagacgtacacttttatgggcagggaaagacaccatgtcgattacagggggagtttccgagttactgaatgtatggactgcccatttgccggacggtgacatgatataacgatgttgcccgctttggtcaacaggacttagccgctttacctctccattgccgaaaagacgtgcctggtagagatagcgctgggtgaagttgtcgggagaagcgataaagtatacaaaacctttatccatatccgcacctacttcttgaatataatcaaaagctccttgggtgatgggcttgatttctttaccatcacggcttacacgatacaggtggcgccatccgtcacgttcgctttcccaagtgaaatacttgttccctttcaaccaacgcacattgtcattcatttccaaccatgcggcatcttgatcggtaaagatattgacgggggtattttcacctattttcgcaatccatactttattggtgttttgggcacggttcatttgctggatgaacagttcgttgcagcccggaatgaattccatacggggaatatagtggttacgtgcatcaccgggaagagccagccaagtggtgtttccaccgtcggcggatacatagcctacttttacagcggagtttgctgttccggctttagggtaaggaaaacgttggattttaggataaatggaatctacattattgatgatatcaaaccatcccgtaccttgggtatcgctttgccaataggctatgtattgcccgtcgggactccagcggaaaccgtcgcggcagttgaattcttcttcgtatacccagtcgaatgttccgtttacaatttcattatttccgtcttgagttagttggttgattttcccgtcagccagactctctacgtaaatgttgtttctggagacatatgctacccggctggcatccggcgagaacttggcgaacattaaggtagcttccggcaagcttttgcccaattgttgcagtttgccgtttttcaaattaagcacccagtaatcaccgcgggtatcataacgccatacgcgacgagtattggtgtagatcaatactttggagttatcttcgctgaatatgaaattgcggacagagataggttttcctgtttgcggattcagaagcatattggcagggatcagcacttctttggaattgtcctttgctttataggcagtgacttcgtatgctccctcggcatttttttctattttggaataacgttctccatctttcatccaactcacgttgcttccgccttctgtcttgatcagtcctccgtatacagcttcctccaatgtggggatatgttgtgcatgagttgtggttccgagacagaataaacataagactaatgtaaataagttctttttcgtcatagttattatgaatcttttactaaaaaatagatgtccatttgaaaacacaagtatgtattgggaatccagatatctgttttcaaaaaacgggcgtctattttagaaaaacggacgcctgctcttttcttttttatttaattcctaatttctgtttgattgcagccggaatagcatctttatgcaccatgaggaaaatagtcttggcacgtacatagctttcggacatattcagataaccgccaaatgtattgcgttctgtaccccaagaatttttggtgatatagtatttggtcccgttctggtctttggtaataccggtaagatgcatcaggtggtcatctgtagtgacaaatgcttcataaccttcctgacggacttccggagtgacatttacttcgggacacggtttttcaaatttgtaggcttccgccagcatctctttttgttctttagggtccatcttttcaaaacgtgcacggtcggaacccgagaggtcttccacttttttcactaccggattgatggctacaccatttttgaatgaaaaacctttttcactgacatcaccgtcccaacatacggtatatccgtgggtcaaagcatagtcggcaacttccatcatttcgtccagcggaagattgtacatttgttcattttcccagttgtcgggtacttccggagagaatttctggtaatacggtttgtgagtgaaactagtcagttcaatataatcgtccatgttcaaacccagactttcggcaaaagatttcggagtgtattcttttcctttgtaagtgaacttttcaggaagttctcctagataagtatcgaaaagattgttgatcagcttgtagtattccgcgctgcgacgtttcattttaacggctgtgtttcctaaagcgttgatgtatctcaccatttcaccatggttatgtttctctgagttataattgattccgtgatatacttcctcgggtacgatacccacttgattgaaagcgttcttccatgtgtgtgaaaggcttccttgtcctaaattcccgttgcctccccggtaatagttgtcttccaattggtttaagtacttttggcgtacaatgaacatttcagaaaggtcatattctcctttgcccatacggagcagttcggattccatgaacgaagtggtggcaaagcaccagcaagttccggtagaggcctgatttttgacaggagttgctttctgtgatgcaacagtcgtgaatttgtaaccactttcttgtgcatacatggctgatgcgcagcatagcagtgcggctagtgtgaatacttttgtcttcataagtttgtttttaatatgataaggttaacaattaaaagccgaagcgtgactcaatccaatattggtttgccatttcgtcccagcgaaggatggtggcgcctataaagtctgccgtatagtctgtgagataagcacgggcggcttcttctcctttggattgaaggatactttggtattgtgcttccacaaatggaagttcccgttgtcctttttcctcgaaatgacgaatatttttttccattactttacgggcagctccccatcttacagcagccagtttgttggcgcggcgatagtgccataaggcggcatcgtcgcgatagcggtggttaccgcagattttatacatagcagggaaatcagtaatgccacagaataccggaacgcgcgggctttgtccgggattgtccatagagaaccataccacaccacctactgcatcgggcagccagttgcgcaattggataactgtagaataagcacattgcggaactgcgatattgcgtactgatttcacaactccctttttaataccgttcagcatattcagttcatcgccacgcatccacggattggctttcgggctgataatggtgtctacttttccggtttttctatcttttaccgtaactttcagattctgtgtcatatccagcggcgttccttcgtatgtttcccggagcaatgccataacatctgttacagatacttgcttgtcgggttttacactgataggcagttcttctgcttcataatcaagctttaatgacggtgccagtgcattcaggataaagtgctcgcgggtgctgaaggatttcagttggccggagtaattctttccgctataggctttccaaaatttaaaaggttcttttccatcccaataccctaattttttagccacgtcaaatacattttcggaagccatatagtggtcgggatctttcagattgagggtgctgatccgtgagatattggcagatacgcctacatgatcatccggaatacggactgccgcccatactccgccaattttatcttttccttctccgaaaacttcgaaatgccatacttcattaggatcggcgatggtcaggcattcaccgctgtcgccatagccatattgttttacgagatctcccatcaggcggatagcctcacgggctgttgtacagcgttgtaacgccacacgttgcaattcttcaatcataaacatacccttgggattttccagatccctgcgtccgcttacggtagtttcacctattcccagttgcttttcgttgatacaagggtaggaggtgtccatgaaggcatatgtttttctcgcttgtggtatttgccccttgatttttacattagtctggtcggctacaaactcggtgtgcatacggccatcgtaaatattcattacagtatccctttcataactttctgccggaaccatgtttacccaggttcggtaccagctgtcgcatgtatgactggttataactgatccatcggtagttgctttctttcctaccataatgctagtgcagctttctggatcctttgtgtaattcgtttgggctgtgacactttgtgccatgactaaacccaggattgttaaagaggctagtagtttcataaaggtcgttttattactattgcgtttcaaaagtatataaaaaaaactattattcagaacattatcggcttaattttgttatttgtatctatttattcggcctttttttgtatttttgcaaaaaatacaaaaattgggagcacatgacaactagtatagacatagctagaaggatagcagaagttaaccatcctctcagtagagaaagtgttcacgcattagccgaaattttagtttgtagaaaatatcgtaaaggggagattgttttgcaggccggtgaggtgtgtaaagcaatgttgtttatagaaaaaggaatgctcagacaattttattataagtatgataaagatctgactgagcatatcggttatgagaacggaatgattatttgcatagagagttattttaaacaggagcccacccgcttgatggtggaaactttggaagcatccgtggtatgggagttaccccgtgtggaagtggagaaattgatagatcaatatcacgatatcgaacgtctttatcgcagctttattgaacattctttgatagagtcacaggtaaaggcggacacacttcgttttgaaccggctcatgagcgttataacaaactgttgcaacttcatcccgagatattgaagcgtgcgcctcttgtatacatcgcttccttattacagatgacccccgaaaccttgagccgtgtccgttcttcattgctttagaattgataaattaatcctaatcgggtttcaaaggtcttatatcttacgtcctcatggtaggaataatgtgtgtggcggtagtaataggacacttccatattggccttgaagtgggaacttagatttagctcgataatcggattcaccacagcgagcattacatttcctttgtctccctgcgcattcagatagagcggatctattgtttccaaatctttatgttcgtatcctttccaggtaaaaatttggtaaagatgcatattcagtgcgaacatgccataacggccgaaatccagaatggtgttgttcttgatgctgtatccgcttcccatattgtaattgcggtctattacgttgtaatagtcggtaaggcttccacccagcaggatggcactcaggaatacacgttgctccaaatttaccagactgttcatttgagggaatttataaatcatacccggtcccacactggcagcttccgaaatcttgtaagggatacgtcccgatccgtcaatcacttcctcggaatcaaaatagttgaagtgctggaagataccgaacatcatttccatgccggtagtggttttcagggggacaccccatagtttgcccatcaggttgatctggctgataagaggctggttcccggaaagaccgaaggtggcccgtgcggtgaaataatcgtatgggccgtcattcactttatcgaaagcatctccgtattgtacccggaattcaaggtagggattgtgctctccacggaacaggtaattgtcgtcggccagataacggtcaccggcacctatggaaaagtgtaccggaatgcggtcgtaatcgtggtatttgtaatgagagcgttttacttgccacatctcgccggttatcattcggttcaatccccgcatggggcagatcagggttcccaaaaactcgcgggtgaaacgtgagaaaccacgcttggagtcgtccagtaccaaagaagacatacggtgcgttacttctcccagggcgatgccgcctagggtggttgccatcaggtcattgatggcgggcggctccacttctgcggctatttcccacatcaaactaccagcaaaggcgtatggagttgattcccaaaaggtaagtccgttgctgcgtgctgcattgaaatagagatttccgtgataggggtgggcgaacaggttggtggagaattggtcgttatcccatacaaaaccatgcttgatattgcgccgtatgctgccgatactgattttggcaaagtcttcgttcattacataacggtcgaatgcccatactccgacattcattccgaaagtttcggcagcggcacgccaagggtgttttttttgcaggcgagggtcggtgaatgtataaatggaatcggagcggtggagtatctgggctgtgacattcccagcacttaatgccagcaggcagactaatgcgatatgctgtagtttcatattgtatgaattagtttatattagtgtgacggctgcttaaaataagataacacctgcttcgaaaataggttttttttcgtagaacttatttttatcatagtagcgcgtcatgccgtaaccacccgatgcaaagaaactgattctggatttgaatttatattccagattgatacgggcttgtaatgaatacatgcgttccggtgtttccgcatcttcattttcaaagttttctatatggaaataacctaagtcgccacttagttccagtttggaggcgatgggatagtaaagaccggtacgatagaacacacagcccgaaaatttgtcattcaaatccagatagtgtgtaccgatacccagcatagtataactccggcggtttttaaaacgcacggcagcattcagtttgctggtgttacctgcaaacagcatcatctggatacgggttttaggagtgatattcaccaaacctagtttatgggcggtagtatccttgctatggttgatgattcctatttgtatcccttttacattcccgccgcacaggttgagtaaaccgatttgcgcaccgcttacttctccggcgtagttgccgggagcgaactgcacaccgcgtaacttgccttggcaaacattggtcagtcctgagaattgcagggcattttccgttttgacggcgatatttaccgcaccgcaaagctgcaagcctctgatttctccggcagcgatattgctgatggcggagaattgcataccattcacgtttacacctacattaccaatggctgagacttgagcgcctttggcttctccgccactgatattgagcagggtggaaacttgtgctccgttcagtttctcggcagatacgttcataagtccgccgatagcgacaccattttgtgattttccggcaatgttggccaagccggctatctgaactccttgggctttgttgccggccagattcatcagaccgccgatggtaactcctcttgatatgtttccggcaatgttgcctaatccggaaaattgaataccgttggctttccctccggcaacattcatcagtccgctgagcataatgccattggcattgcctccggctacattggcaatacctcccagttggaaaccggaggcgtggcatccggtaatgctggccagaccggagatttggaaacccgtcatatcgttttgtacaacactggacacagcgttgatgccgattcctttcagttgatagatatttgtaagcagaccgatattcagataagtggttttgacactgtctttctttgcggaaatgttcaaggagatgttgggaccctttttaagcttgtcctttttctgggcaaaagcaggagttgacatacctgcacaatatcctaaaaggagtattgctgctatacgcatattcattttcatacatttttagtttcttgggtgcaaatgtaataaaaatgtagatataagggggaattatggggagaattgatcggggtgaaagagtaaaattatgttttgtattgtctcctttcacgtatcatgatccaggtgcccatatatgcggatgtataacctgtaacatatataatgtatagcctgcaacatctataatcttcagacttatacattatatatgttgcaggcaggttcttttttctgtcaggtgttattttacttcctgatataagaaacgtttgatactctttttaggagttttctcgaattcttccggatagatttttacacgggctatttgtgaatatgcaggaagttctgtattcaagttgatacggttctcttccattgcctgtgttatcgcgtcattatccagcccatgagcaaaggcatcgtcgaaatcgggataaaccaaagccgccagtttgctgtctgcctgctgtatgataatactttctgaaacgaacggcatgttattcaatttatcttcaatctcttccggataaatattctgtcccgatggacctaacagcatgtttttgctgcgtcccttgatggtaacattgccttccgcatccataacacccaggtcaccggtatgcaaccagccgtccttgtctattacctcggcggtagcttcgggattcttgtaatagcctaacattacattaggtcctttgcatactatctcacctactatattctcagggtcggggctcaatattttgacttccatacggggagccgcctttccgcaggaccctagcttgaaatatttccaatcttcataacagataattggagcacattcagtcatgccatatcccacggtataggggaaatctatacttttcaggaactgctctatttcttgattgaaagcggcgcctcctacaataatttcgtaaaaattacctccgaaggcattaatcatctgttcgcggactgtggctttgattttatcattgatgataggaactttcagtaaaatcttcatagccggggtttccagtttgggcagtacattcttcttgatgattttttcgataatcaatggaacggctactaccagattgggtttcacttcggaaaaggcttggaagatgattttcggactgggggtacgggtcaggaaataaatatggcatcccacacagaattcataaaggaactcgaaagccagtccgtacatgtgtgccatagggagcatggaaaccagcttgtcacccggattcattttcaagacatcaaaagcgaactgggtattcgaccacaatgcgcggtaaggaatcatcactcctttggaataactggtcgtgccggaagtatagttgatcacagccagttcttccggtgtatcccggcggtagctgacatgttcccggcggaaattgcgcggatatttctttccgaacagttcattcagatgatcgcgtgcatagtccaatttggaactgcgagacactagcagggtatagtcattcatcaagataaccccttctaacaacggcatggcattttcattcagattctcccataccatatcgcctaccattaacaggcgtgcttccgagtggttgactatattatgaatgttgtccgatttgaattcgtgaagaatgggaacaatgactgctccgtatgtaacggcagccaggaaggtaactccccaatgagaactgttgcgaccacagacagctatcttgtctccttgcttgatgccgcttaattcgaagatgatgtgtagcttttctattttgcgggctacatctttatattgtaatgtggcacctttataatctgtaagggcatctaaatcccagtttttctttatgctgtcttccaggaaggcaataaaactctgctccattgtatatactcttttgtttatattttgcacaaactttaatcaaatgtgcaaatataagactttctttggagcatacaaattaaacagagggaaaaaatagtggttagtgattagtagttaatgggctgtgctgtgataccgcatggatatgaaccactaaccaaccaattaatcactaaccactatttttcattctttactgctgaaatacttcatgaactgtgtacgttcaaacggattgctggctccagtagacagcgcgttcatcgaactcttgaattcgctgatattcttgtagccctgccggttcatccattgagttatttcatttgtcatatctgcaatgacctgattgcctctttggtagatgacactgcataattctacagccgaagcgcctgccaggattgctttgactatcgcttttccatcgtgtacaccgcctgagatggcatagtctgtctgaggaacttgtgccgaagcgatagcagtccagcgcagtccgttggacaagtcggcaggagtactgaatacatcgcctgcagaatatgtcatggtgtcgatattgatgtccggctggtagaatcggttgaacaataccacagcattggctccgttggcataaagctggttgatcagtgcgatggggttggtcagattgctgcccagtttcacaatgacggggatggaaatctgtttcttgatactgcttacgatatcgatatgacgctgttcgaaagaaccgcattgatattctttttcggtctgcaaggaaaggatgttgatttccagtgcgtcggcgcctgctgtttccacagtacgggcaaagtctgtccattctgagttgctgaaacagttgatgctggcaatgacaggaatggtgcaaagctttttagtctgttcaatcaatgaaatatattcgttcaatgcatgagagcgtacatatgtgctcaagtagtcatctccttcgggagaaccataagtagccatgtgatgtgcttccatcatgatctgctcttcgaaaactgatttcaaaacaatggctccggcgcctgccagctccagtttcttgttcttttcagcgctgtttgtaaggctggaactgctgataataataggattgcgcagtgacaacccggcaaaagtggtttttaattgagtcatataaatagtagttttaatagtttcgttctccaaagattttgcttcctaccctgactagtgtacttccggcttccaccgccagcggataatcgtgtgacatacccatggaaatttctttgaagtattctgaatcagaaaaatagctctgcttgatttctttgaagaatgtatttaaggaacaaaattctcttttgatttgttcgtcgtcatccacattggtcgccatacccatcactcctgataagcggacatttttcaaatccttccatccgcctgtatccagcatttccctgcattcgtcaaaagaaaaaccgaatttcgtttcctcttgggcgatatgtatctgcaataaacaagggatgacgcgatggactttggaagcttgtttattgacttcaaccaataatttatacgagtctatggcatgtatcatagctacataaggggccatgtattttactttgtttgtttgcaggtggccgatgaaatgccattcaatgtctttgggcagggtttcatatttctgagtcatttcctgcacgtggctctcaccgaaaatacgctggccgacagcatacgcttcttccaatgcctcgttgggatggaatttggatacggctaccaggcggacccccgtaggcagttcggaaagaacttcttttaaatttgcttgaatgctcattatctgttatactttctattttttatcaggctttattcggtttttccggcatccggaaattcaggtttcacatccggttcggcttcgtatgggtaaacatccatgatggcggtttcggctacggatgcaatcacgtagtctgccattgtacctttcattccttcgtccagtttctttacagcgtcgcgcaggtcggaagcttgtaccagtacggtagtggaggtctttttttctgctccgcttttttcgtccagcgtgatgaagaacagcttgcacttaaaccagcggtcggctgcatcttcttcagaggggaacagttcgctgtagttggctcgtttgatgtccgaaacagtgaactcaccgctgatatacggagtgatttcttcaataatacgggcttctgcttcagtaaagctcagcgcgtcaaccaaatagggttccgttactttcttgttcatgccgttttccatgactttttcgtaacgtatcttacattcaaaccaagtatgcatcataaaagtttattgttttattgaatattaaattggatacaaagatacaatttatttaatcttcatctcccattttacttaatttcttcatgctttccttattccactagtttgcagctgttcaattgcatgaattcgtgaatcactttttcatgatcgcccattaatatgatgtgatggttacctaaaggattacgcataaaatagtctaccgatttgtccagtttgattcttgcttgtgtgcggcaggcattgatgtagttggtattttctatcagttggcctgtggatacgaaatactcgtccaggcattctcccgcgcattttatcatcgtgatgcctcccggatgcaaaataccctgtatggctattccggtttctgtttcaaaatgattccggatgataaactgatccaccattttggtggcaatcgtacagtgagccatcactatttcgttcaggtcatcgttgatgaatgccggattcgccatgaatcctgcctggccggtcagtgtcttggcgatgagcagagtaaagatggattgtaagtctccttcacatccggccggaatgccttcatcattaagcagggcaagtgccagacatccagttgttcctaatttctcaatcagggagaagcaggagagggttactgcatccagcttttttttctcgcaaataattttcactgcctgataaagacgcatggctttcagcaaatcttccggagtcccttcccggcaggcaatggcacggttggcaaatacggacgcctcatatcctatatcatcatcctttatctgataaaaaagacaatacacttcctccatggggatatcaatgaactctattccccagcggcgtctggcaagcaggtaatctacattgctggccaccagccacggagaagaatatcccacaactccgattcgttttcctcttacctcgcgctgggcggcgaaagccttgtgatgatctatcagttgtctcaccatattggggatagtgccatgaataatatgtactttcattcctttgctgcgtatccatgtagctatttccagggaagcagccagtgagttctgttgtccgtcggtcagcagatggataggatagggaagtagttcgaagtgttgggtgaccattttttctaccccgcccgaagcgatgaaagccatccggtaggcatctgccggaatacttgcagcctctgtataaggtaccagatgaagcgtgaaaaacttctcgatttccacaaataaatctttatggcaatcatatacagactcaattctgttcaaggaggactggaaggttatcaggtatagattcatttgatattttgctttgttttactggaacaaacttacatgtttttttttaataaccctaaaaaatgcgcattaagataacaaagatttaaattcttaattaattgtttgctcggttggttgcgaaagtctatctttgcacttcgattaaataatttttataacattatgccaataatatccatcagaggaaacgagatgcccgcatcgccaattcgcaaattggcaccgctggccgatgctgcaaaacagagaggagttcatgtgtatcacctgaatatcggtcaacccgacctgcctactccgcgagcggcccttgatgcgattcgtaatattgaccgtaccgttttggaatatagtcccagccagggataccgcagctatcgcgagaagctggtgggttattataagaaatatgacatcaacttgtctgccgatgatatcatcatcactaccggaggttcggaagcggtgctgtttgcttttctaagttgtttgaatccgggagatgagatcattgtgccggaacctgcctatgccaattatatggcgtttgccatttcggcgggtgccgtgatccgcacggtgacgactaccattgaggaagggttctccctgccgaaagtggagaagttcgaggagttgataaacgaacgcacaaaagctattctgatctgtaacccgaataatccgaccggctatttgtatacccgccgcgagatgaaccagattcgtgacatggtgaagaagtatgatctttacctgttctcggatgaagtgtaccgcgagtttatttataccggttctccttatatttctgcctgtcacttggaaggcattgaagaaaatgtggtgctgattgactcggtgtccaagcgttattccgaatgcggcatccgtatcggtgcgttgattaccaagaataaggaagtgagaaatgccgtcatgaaattctgccaggcacgtctgagtcctcctttgatcggtcagattgctgccgaagcttcattggatgcccccgaagagtacacacgcgagacgtatgacgaatacgtggagcgccgtaagtgcttgattgacgggctgaaccgtattccgggtgtttattcacctataccgatgggtgcattctatacggttgccaaattgccggtggacgacagtgaaaagttctgtgcatggtgtctgtcggaattcaactatgaaggcgagacggtcatgatggctccggctgccggattctatactactccgggtgcaggccgtaatgaggtgcgtattgcctacgtgttgaagaaagaggatctggtccgtgcgttgttcgtactgcgtaaggcattggaagcatatcccggaagagtagaagactgatatggactggaagctctttattgccagacgcatctatcgcagcaatgagggtggaaaagaggtgtccaagcctgccgtccgcattgctatgctgggcatagctatcgggctggccgtcatgattgtgtcggtagcggtggtgatcggtttcaaacatgaggtacgcgacaaggtggtaggcttgggggccgatatcgtaataactaacttcgactcccagcaatcttatcagacggttcccattgtagccaacgacagtttgctccatctgttgaaaacactggaaggagtaaagcacgtgcagcgctattccaccaagccgggaatgataatgacaagcgacagctttcagggaatggtgctgaaaggtgtttctcatgaatacgactggaggtttttaaagaatcatttgcaggaaggggagattcctgttttctcggatactgcctctactaataaggtattggtgtcccgcactattgccgacagactacatctgaaactgggtgataaaatctatacctattatatagaggacaatgtgcgtgcacgtcgtcttactgtagccggcatctatcagaccaatttttccgcatacgatgatttgtttctgataaccgacttatatacggtgaaccgtttgaatagttggcagaaagggcaggtgagtggtatagaactggaagtgaatgagtatagccggttggagtcggtgaaagaggaaatccgtgcacgggtggatacgcaggtggatgcatacggaggtacttactatactcagagtgtggaggaagtcaatcctcagatatttgcatggctggatttgctggatatgaatgtgtgggttatcctgtttctcatgacgggggtggcaggattcaccatgatatccggtttgctgattatcattctggaacgtaccaatatgatcggggtgctgaaagcattgggtgctgataattttgctattcgtaagatattcctcagtttttcggtattcttgattggcagggggatggtatggggaaatatcatcggggtggcattatgctttattcaatctcaatttcatcttttcaaactggaccctgccacttattatgtagatcgtgttcctattgaattcaatatttggatttatttgttgctgaatgtctgtaccttgctggtatcggtgctgatgcttgtcgggccgtcatttctggtgacgcgtattcatccggcaaaatctattcggtttgaatgagaagattctctttctgctttttccgtatatccggtattaatcctttttttcttataatgctaaggtctttttttcttatgattaagtttttttatgcggtaatgtactacagtttcctacagtgaatcgtatagtccattatagtggactgtacggtctgatgtaatggactgtacagtctgttgtgaaagtctgtagtagttgatagaaagaaaaggcttaattgttaggaagaaatgctttagttgggcggatgtgttagaaccaaccctgctgcgaattcgtgacagggccggttctttatagagagaatgtaaagttatgtatagtatgtcacttccttcagcttacagtttgcaaaagaaagaaacgaagaaaggcatgcttatgtttatcagtatgccgtggacgatggccacgggtacggcttccggtccggagcagcgtgcgatggctgccagggaaatgtcggaagaaccgatgcccgccgccgagataggtgccagataaccgaaatatttgcggaaaaggggagctcctatcaaggcggtcatttcccggaagatattggatagtagcgcgatggtccccaattcggtagcaagctgcacaccgatggagggggatttgatctgcgtgataaggatggaggaaacggaataataggagaatccgcttccgacagccatgcagtcgaagatactccagcggctcaagagaaagcctccgatagcggaaaacaacagagtaccgcttacggtggcaaagggtacgagcagtgtcctgaaattgagggataaaacaaactgcctgaggttgcggttgcttccaagattaatgccgagtaacagcatcagtacatatagtacatatacagaggtttggtgtacgtcgaagtccaccgcatagctgactccggctacgcagccaaacaagaaaaaggctagagttacaagactacttttcaccgtttgccccctttcctctgaaaaaagatgcggtatactgcaagggaggccatcatgctgcccaatatgcttaatgaggagatgacggctgcctggccgcagaagtaaccaagattgtcaataatcagtctgttaagaccaatagagagacctagtaagaaaagtagcagacagaccacgatatggatgagaggagtgatcttgcgtatttgggatttatggcgtaagggatagcctataaggactccgacagccattatagaaatgaaagtaaacatgagattcaactgtttttctgattttacaatactacttataacacgcttctagacaaacgcatttacggtatattggtaaagttgaaagaacggatggaccagattattttcatacttatgctttcaatttgaaactttttattgtttttaaaacgggtgcaaaagtagagtaattgtctttaatatgcaaataatatacatattaaatcttattgaagcgaaatatgatataaaacaaacaatattggtgatatttcgttgtaaaaagaagattttaaattgttacatttatagtttgaccgaataatattgcatgtgcatgggtgggtgaaaacaatgaaaaggggctgttcggggtgtgttagagaatataaagcgataaaaggtttcaatttgttatgctggataatgtgatactcttctattttttcaggcagtgattacattggtggaaaagtgtttcttgcataacctttcttggcggataaaaataaatcagggcttgtttatacaaaccctgatttgtttttgtcggatcaagatggataaccggattagaattcaaatttttctaatttcatcttgcccaattcttgcaatttaggaaccaaggttataaaatgtgcagccttttcgtgtgcatccagtgactcagcatctttccatgtttcgcaaatcataagtacatctttacgtgtcgcgctctcaaaaacatcataagcgatacaaccgttgtcgtttaaagattgtgctaccaattcctttgctgtttctaagacagcattgcggttactctcgtttacttggataaaaacatttaatctgatcataattcgtattattaaattaagaaatgtatagttggtttcattctctttttattttctcataaactcatttttccgtctgaatttacgttgtaatttgaataccccattccatgcaggttgcagaaaatcgaataaggggagtagtgcacagaacttccgttcgccaaaaactttggcggtttttctgaaaacaatcagttgcatcgtgaagcgtgctaaccatagcaaaacggcaatggctgcaatagtccattggtggagaagaatactgatggttatagtggcgatgatggctgtatagaacaagaatctgctgcaagtttcaaatcccatgagataacgggcggttccatgaaataaccggctggtagccgcatagcttattttctcttcacaccatattcttttatatttaggcatggcgattcgcatcagactttcagggctggcttcaactcgtgtattgtgtgcacgggctgtttcattgataaacaaatcatcttctccacgttgcagattcaggtgggaggcaaatcccttctgcttgtagtacagcgttttccgataagccatattccttcctgtacccatgtagggatgtccggaaacagccatacccaaataacgcatagaattcagtaatgtgtcgaaagtgattttcttattaaaccatcccggtactttttcgtagttgctgtagcctaaaacgatttcggtggcaggtgtgaaattacgtgccatctgtttcagccattgattgctttgcggacggcaatcgggttcggtaaataccagccattcatgacggctggctttaattcccattgttattcccagttttttgtggctgatataacgtgcactgtcggggataaaggtatgatagagattggggtatttgtcttccagtaatttcaacgtattgtcacaatcatccgccgggcggtcgtaaatcacaatcacttcgaattccggatagtcctgctctaaaataaatgggaggttttcttgtaattcgtgggtggcgtcttttgccacaataatgacagacagtggaggattttgagtatttatatcagtggcatatgctgtttctctgctgtgagtgtatagtttgttatatagccctagatagtaaacagcctgcgtgataaacaaggctcccgaagctattggtaagattgtatctatggtgaatagttccatgtgtgatctgtattaaaaacgtgcaaaaatacagcaaataattgaattgtagcagaatgaatattctttatttattcaaaagctcagatttaattataatttaatgttaaaagtgtgttttcgtgaatatttttcaagtataattgctatatttaaagaagttaactgaaacctgtaacaagtcctgaccaacgggcaattattatgagaatacaatttgagattaaagaaagtttgatcaatatacttgatcagcttatgcattccgatttttgggctacggaaatcaaggaagatgagtcgggaaagaagattatcaagattaaagacttggcttataacttagaagccgtggccgaggtgatggggaatgaaatttttattaaaacagctttgtctaagtacacttatcgtatttatgaggtgaaaggggagtgttggtgtgagtatgtgggggcctatcgtggttttttggaacagaagctccttccaataattactccgaaggaaaatctgttggaatgtgaggtgctggatagttctatattaggaggtaagcagaaaactttgcgtgagtatgcggaagataatttaaagctaaagaaattccgtgaacagaattttggtaataatggattctcaaaagcggatcatccgcggcgtgtgtatgatgaatttataaaagaagatttcattccggaagataaataagaaacagcgccgctttgatacaaagcggcgctgtttcttatttattcaggcagttggagttggtttatactaactcttctgaagtatatcctttgggcaatgcacgacaattgtaagccgatgccataatttcaccatatgctcctgctgaacggagagcgaaaaggtcgccacggtgtgctttgttcaaatcaatagctttgccgaatacatcggatgattcgcagatggggcctaccacatcgtaagtttccataggttcttccgaagtgatattttctattttatggtatgcctgataaagggcgggacgaatcaagtcagtcatgccggcatctaatatggcgaactgtttgttggctccttgctttacataaatcactttgctgataaggctgccgcactgtcctactacggcacgtcccagttcaaaatgtaaagtttgctgggggcgcagtttcagatgcttgtgataagtggcaaagtattccgtgaagttggggatggcttgacggttggggtgtgcataatcaattcctaaaccgccgcctacattgatatgttctactatgatttggcgggcatagagtttttcctgtagttcgtttacacggttgcacaaggctacaaaatcacccatatccaaaatctgagaaccgatgtggaaatgtaagcctacaaattttacatgaggcaatgttccggccatatcgatcactttgtccatatcttccatgctgataccgaatttgttctctgctagtccggtggtgatatttgcatgggtatgcgcacctacattcggattgatacggaaagctacacgggctgttttgcctttggcggaagctagttcattaatgatttccagttcgggtacggactctacattgaagcagaaaatatcataatccagacccagattaatttcccagtctgttttacctacacctgcatagactattttgtttgtcgggaatccggccttaatggctgcgcggatttctccgccacttacacagtcggctcccagaccgctttcgcggataattgtcaggactttgtggttagcattggccttcacggcgtaatgcacgcagaaattattgtatttgcctgcttctttattgatgcatgacaaggtttctcgcagcacattgacatcgtaatagtaaaagggagtttccaactctctgaacttgtttacggggaatgttcctttcatattgtattttgtttttatgagcaaaggcgaattaaattcgcccgaaaacaccaactttataaagtgagatgtattcgggcggattcaatccgcccctacagtagaaattatttattgttgaataaatgatcgcttaatgactgcaatgctttcttcttgtcttcttcacgaatcaggaaagaaatattgtagttgctaccgccgaatgaaatcatacgtaccggtatgtcgcgcatggcgtccaacgctttggcttcaaagcctacattttcccattccaggtcaccgactacacagatgatacacatgtcctgatctacggttactgtaccatatttcttcaagtcgtccagaatttcattcagatgtttggtgttatcaatggatacggaaacgccaacctctgaagtgcagatcatgtcgatagaggtctgatagctttcgaagatttcgaatactttgcgcaagaagccgtgggccagtaacatacggcttgatttgatcttgattgcagtgatattgtctttggctgcaactgccttgattttgcctttttccgtatcattggaaatcaaagttcccggggctgtaggttccattgtattaagcagacggacgggaatattggcatatttggcaggctgtacgcaagtagggtgcagaatcttcgcaccaaagtaggccaattcggcagcttcttcgaagtgcaggtgacgtacgggagaagtcttgtctacgatgcgcggatcattatcgtgcataccgtcaatatctgtccatatctggatttcagaggcatttacagcggcaccgatcagtgatgcggtatagtcgcttccgccacgttgcagattatctatttcgccgtaggcgttacggcagataaaaccttgtgtgatataaatttcagcgtccggatgtatttctagctgtgcggccagtttttctttgatatatacagggtcgggctccgagttcttgtccgtgcgcatgaattccaatgccggaagtaagatggcgttgaccccttgttcctgcaaatagttggtaaccatgttggtagagatcaactcgccttgtgccaggattactttttcttcgaacagtgtgaaaatatcttttgtatacgaacgaatataatcgaactgtgcttttataaattcctgtgttttctgcttatactcgtcagtagaataaagttcattaacatgctgtttatatttagcctccagtctgttaatgatttcattcgcaccttcgggatttttcttatacagataatccgaaatttcaaccaacgtgtttgttgttccagacatggctgaaagtacaacaatcttctgttcaccgtcggtaattaatttggctacttctttcattctttgtgcagaacctaccgaagtacctccaaactttaaaactttcatttttcgtttcgtattttaattgttcctatattgataattagcgtgcaaatatacaaataagactgcaaaaatcagcattttagcgatgatatttatcattcatctacttattctgccgtttcttggggtgcaactgtcgttttttctcctttttcggtctcattttgacttctttccatccggctgtattcgtgagtcacttctttgatatgatgattctcaaaacggtagacaactcccggatattccgacaagagatgtagattatgggtggtcatcatgatggcggagcctgcagcacaaatggatttcagaagttctacaattttgcgccctgtttccgtgtccaggttacccgtcggttcatcggccagaataatgtccggccggtttaggatggcacgggcgataacaatgcgttgttgttcgccacccgatagttcgttgggcattttgtatcctttaccggtcattcccacttggtccagtacttcttcaatgcgtgctttgatggttgctttgtttgtccatccggtggcgcgcaatacaaaactgaggttagcgtgtacggtgcggtctgtcagtaactgaaaatcttgaaagacaatgcctaaacggcggcgcagttcgggaatatgcttccgcttgatgttagtcatgttgtagcctagcacctcggcttctcctgactgtatatccagctcaccgtaaattgttttcagtaatgaggtctttccggaaccgactttcccaatgaggtaaacaaattcacccttgttcagttccaggtttacatcttccaatacgcctaattcttgttggttgatatatacgtttttatatcgaatgagagcttcgtccatcattttagtgttttttccacgtagcgctatgacgttctttcaattcacgggcaaggtcctcgatgcgatagccttttgaggtgagcagtacaatcatgtggtatatcagatcggctccttcgtagataaggcgttcgtcggttccgttacaagcttcgataaccgtttccacggcttcttcacctactttctgtgccattttgttgataccggattcgaacaggctggtggtgtaagagcctgcgggcatttcctcatgacgtttgtcaatgaaatcttgtaattcctttaggaacatgatgtcttctttgttttcttctccccagcaagtatctgttccggtgtgacatacaggacctgccggatttactttgatcagcagggtatccttgtcacagtcttcttttatagaaacaacattcaggaaattcccgctttcttcaccttttgtccacaggcggttcttggtacggctgaagaaagttactttaccagtttccattgtttttcggtatgcttcttcattcataaaccctaacatcagtactttgttggtgctgttgtcttgtatgatggcggggatcaacccgttcattttttcaaaattcaaatccatttttctatatttttattgttatattatcggtgttgtatagaacttgtttaaaatttcatcagcatcgtcattcagagtggaatgaggacctgaaggtcgtttgccagtctttcaccctgtctgggatggtaatggaaacagatttagatgcaattaaaaacagagttataacctcacattaattccttgctcgcaaagatactgttttaattcgggaattttaatctctccgaaatgaaaaacgctggctgctaatgctgcatctgctttcccttttgcaaatgtatcgcggaaatgttccatgcatccggcgcctccagatgcgatgacgggaattgtcagtaaatcggccagggtggagagggcttcgttggcatatccgtttttcactccgtcatggttcatgctcgtgaagagaatttctcctgccccgcggttgttcacttctttagcccagtcaaacaggtacttgtcggtttcaatccggccaccgttcagatagcatttccagccagtttcggtctgcttggcgtcaatggctaccacacaaacttgtgaaccgaaatgtttggcaatcttgtctaccaaatccggattacggatggctgatgaattgatagaaactttgtcagctcccgcgttcaatagccggtctacatcgttcagttcgtttatacctcctcctacagtaaaggggatattgatattagccgccacccgttttaccaaatcggtaaaggttttgcgtccttcatggctggcagtgatgtcaagaaagaccagctcgtcagctccctgttcactgtaggtatgccccagttctaccggatcacctgcttgacgtaagtttacgaaattggttccttttacggtctgcccgtctttgatgtccaggcaaggtatgattctttttgctaacataatttgttcttacatgaaacggtttaagtctttcaatgtaatttttccctcgtataacgccttgccgaaaacaacagccgggactttggctatttccaggtcgataatatcctgtatacagcttactcctccgctggctatcagatgcatatccgggaactccttcaggatttgctggtatagttccacggaaggcccttgcaacattccgtcacggctgatgtcggtacacaacaccttgaaaactccttctttagtataatctttcaaaaaagggatcaactgctgctgactttcctctttccagccattgacagaaattttattcttctttacatcagctcccagaatgattttctcgtttccgtattgttccagccattttttgaaaagtctgggatttttcacggctacgctgcccagagttaccatttgtgcgccattatcgaaagcgatgactagatcctcgtctgtctttatccctcctccaaaatcaatgaccagagaagtacggctggcgatttggtccagtacacggtaattcacaacatggcgtgaggctgctccatccaaatcgacaatgtgcagacgatgaatcccatgagcttcaaattctttggcaacctcaaccgggttttcgttatatactttctgtgtgctataatctccttgagaaagacggacgcatttgccatcaataatgtcgatggcaggaattaactctatcatatctatttcttcttatacattattatatataatgtaatggttcacaattctaaaaagttcctcaggattcgttcgcccacggctccactcttttcgggatgaaactgtgttgcataaaaattatctttgtgcaaggccgaactgtaggggaggatataatctgtttgtgctgccgtaaactcgttcaggggcacatagaagctatgtacgaagtacacaaattcttctttggtgaatcctttgaacaggtcgctgcgtacatgggtcagggtgttccatcccatatggggtactttgtcttcatgccgggtggggctgaacaactttacatcagtatcaaagatgcccaagcaatcggcatttccttcttcggagtgccggcacatcagctgcattcccaggcagatacctagtacaggttgttttaagtttttgataacttcatccagccggtttttccggagatggctcatggttgtttcggcttcgcccacaccggggaagataactttgtcggcactcatcaatagttccttatcggaagtgatggttgcttctactccaaggcgcttcaatgcatagtttacggagtagatgtttcctgcattatattttacgacagcaattttcatcagctaaagataactgttttatttttataagccaatacttttcgttcaatatgtttctgaacagcacgagaaaggactattttttccaagtctttacctttacttactaaatcctgcacagtgtccttgtgtgtgatgcgtactacatcttgctcaatgataggaccggcatctagttcggaggtaacataatggctggtcgcaccaatgatttttactcctcgttcaaacgctgcatgataaggttttgcaccaacgaacgcagggaggaaagagtggtgtatgttgatgatacggttggggtatgcttcaatcatttgttcggaaatcacttgcatatagcgtgccagtacaatgaaattgatgttatgttgttccaacagctccatttctgctttttcctgttccattttgttctctttggtaatagggaagagatagaatggtataccgaagcgttctgctacatgctgcagatcgggatggttacttataatcagcggaatttccacattccattctccggcagtgtagcgtgccagcatatcgaacaggcaatgggacagtttggaaacaaatatggccattttgggttttacatccgagaaataaagacggaatttcatttcatatttttgggcatacaatgtttcaaaataatcttctattttatctttaggaataaagaaatcctttatttcccattctatacgcatgaaaaatatattttctacatggtccacatattggtctaagtagacaatattacctctgttaattgtaataaagtttgtgacttctgccaaaatgcctggttggtctgggcagtgcaacaataattttgcagttgtattcatctttttccctaattttcgattttaatctattgagtgcacaaaaatagcgaattattgctaatgagctaaattttataacaagaagtttgttgaaaagattaaaataataacaatatcgtaatttttaggatgggaaggtaaagggagtcggagaatatttttttaatggtttttgccaaaatgcttgcagatttaaaaataatgcgtacctttgcacccgcaatcgagagagaaagtatcggaagaaagattattaaaattattggtgcgttagttcagttggttagaatacatgcctgtcacgcatggggtcacgggttcgagtcccgtacgcaccgcaaaagtcttttttcgatttatcaaaattattggtgcgttagttcagttggttagaatacatgcctgtcacgcatggggtcacgggttcgagtcccgtacgcaccgcgaaagggagtaacattagttactcccttttttgttgtgtatcaaacaattaaggcattggaagtagatggagaacatgtaaaaattgggtgtatatttaccggaaacttaccagtatttcccgatttttaccgatattttcacctataatgataccgcctttgataccatttttttattgtagcgataatcagtagataccaaaactcaaaagaatatgaaatatccgacaatgagattcgtctttgatcgtaaaaaggttgcgacaaagacacacaagggactcgttcaaattgaagttttgagcgaaggtaagagaaaatggatcggaaccggcgttaaagtctattccgaccaatggaatgatcgaaagaagataatcaattcagttgaaatgattcaattgaaccagtgtcttgatgaacaactccggattatccaaaattggattaatgagcttatcagcaaaaaggaagtttttgattttgataagctggatagatttttgagatataccaataaatcagaaagttttgttgactttgtagaaagaagaattgaagagcgtggagatataacggaaagtaccaaagcttcccatcggacatttgcggcctcattacgtgaatttgacagaataatatatttttctgatctgacaaaagccaatatcacattgtatgatgattggttacatgctaagggctattcacagccgacaatatataactatcataaacgtaacaaacgttatattcacgaggccataaagtttgatttgctaaaaaatgatccgtataagggtgagcgtttttcccgtggcaaacatgccatcaggaaatatttgactgccgaagaattgaagaaagtgaaagatgctcaaatagactcggaaacgatctgtagagtccgtgacctttttatttttcaggcatatactggaatatcctatgctgatcttgctaaattcaatttcaaacgtgacgtacaaaaacgcggcaataagtatgttatattggatattcgtttaaagacagaagaaaactattttatcgtattactgtctcctgcaatggaaatattgaaaaaatatgattatgtgcttccgattatcagtaatcaacaatacaatttgcggcttaaaatagttgctgattatgcagggcttgatagaaatttgaccgttcacatgagcaggcacacatttgcgacaatgtgcctgaacaatggggttaaaatggaaaatgtgagtaaaatgctcggtcatacaaatgtacgcaccacacaacaatatgctaaagttctgaatgccgaagtggaaaaagactttgagatgctggaacggattttgtcatagcataagagagccacgctaaaatagttctactgatatttagcgtggcttgtttcatttgaaatactccataacttgtgccgattgttcacggagaccacagcaaagataattttgagtcatttccacacttgcatgtcccatcatttggcttatagagtataaatcggcaccccgtaaatacaaattggttgcaaaactccggcgtgccgtatggcttgaaacaaattcccatttttcaccttccacttcctttccggccttgaatattttaaccgcttctgtgattccggttttccggcaaatattacggatattattgttgaatgtcggatcgctaacttcttctttaggcaagtttgttagtagctctttcacaattggcttcaatggcactgtggcatgagtcttagtctttaagctgacataagagatcattccacccactatattacggttgttcaaccgtgtatagtcactatgacggcaaccagtaaaggctcctattaaaaattgtgtgcgtaccaattgttcgttggcattcttgggaacataggtgataattcgttcaagttcttcatcagtaagccaaacattagtgcttctcacattttttactgaaaggattttattatagtctttaggtagctcaacctcttcattatacaagttcaatacagcttttaatttggcggcatattggcgaacagagtttggtgccagccgttcttccatataatcaacaaaagcctgcaatcggacttttgaaagattctcccatgttgccgggcaatcgttcgccttactatacatgttgagtataatttcatatttggggtattttaccaaaaatgctgtacgtaaatctttcatttttatttcatttctttattccaactatcataaatatcttcccaattatcacctaagccaacccttataccgaaagcgttgtaacattgttgtaccgtttctttcggtggtaaatatctcccgtcacttaacattatatagccttcgtttatttcttgttgtagcaagtttatatctactggcataatttcatcagggaacagcaccacgtttcctttactcgtttgataactgactcttggtagttcaaaatgccctctctgcccagtcaataaagaacagattccgatttctccggtaatgagatgaacttccgtgtttggcgcatttataaccataaaataggcgttatcgtcattttggaaatgatttactactctgcccaccctttctgtatcacatcttctcattctctcgtcccaaagatgtcccaaatcatcatggaaccggatataatctcttaccttatcccatgttcttacagacagaaatttcatagcaggtagagtaagagttttttctacaccattatcatatttaagttcatgggtaaagtaatgttttcgtgagccggtaatgtgtatatccgtaacatcaaagttttcatcatatccgttttcggtggaatattcttcaagaacaacaatatcactctgtacgatttcatcaactatcttttgaaactcattataggcgttggttagcaggttttcggtattcatgttgtcctgcatgggtatttgtgcaacaagtcttatcgggtattcattatgttctgtaccatagcacatattctccacaataccacaattaaccttcccacatctttcatgaaagaagtccattgtacgcaatacatcttggttgcttaatttcgtgggttgggtgacaaacagcacataacttacttttaccctactaagaagttctatatgcacgtttgtaacacttggaggcgtgtcaataagaacataatccgggttgatagagtgtattttctttttagccagttcaagatattgccttaccattgatttttccaagtaaataaacttggaaaacatatttccagaagagtgtacccaaatcatttcatgcggatgatcgccttcaaattcggtgttcattgacggggtatttatatctgcatcaatgataaacaccttattcccttgttttgcaagtaatcttgctatatttgcggttgttgtggttttgcctacgccgcctttgcctgaatatattataatagctttcatatcaattaaatatttggttcaataaattctatattagccatccgcatttcatcttcaaacgcccatttgtaattgtgattttcccaaaatgaagcatattcacaaccacggcaagtaacggagtatcggccttctcctatttttcttgctttacaaacatcgcggaaaatccggttatctatcggaaagtctgtaaaacatacgatctcttttccttcatccagtagctttttaagaagctgatagtcacgactggttctatatggcatattcatggttgaccccttctttcatcaattcaggattatcaaaagcatttcctatgactcgaatttcccgtttgaaatcattccaccaatcaggtgaaatttgttgccatgggttcatccattctttatttaagtcgctgatattggcaaggcaaaagcaggcatattcatctatgtatttaaccaatttgggatatttaccattaacactaataatgtcatgttcgtaaatttctgtaccttctttatctgttttgcctataaattggccgattgttttgcaatcaacctcatactctatgaatgttcttttacctctatggttcagatcaccatatacccacatctttgtattaaggcttttgcctctgaattttattattctcataaatattaagagtcaagttttttaataaattcatttaatctactggctgaataatcggtaccgccaattat

SEQ ID NO: 14411 - DNA, 1691 bp, Unknown
  gut microbiota DNA sequence
ttatgaatcaaaagatataccaaagcaataaacatttaattttcaacagattattatttaatatattgtccgataacggacagtatgatcgtttttgtcagtcgtattcatcccacaacacatctaccggactaatacaactgatgctgtataccggaataagaatgccaacaagcattatgaataatataaaaaagtaaacaatcaaaaaaacgacatagcctaagaacaaattaaattatgttcgggaaatgagtgaaaaggaagaaaagacacttcatttcccgtaacaatcaatgtattaattaagagagagttttatcttgttgtttatgtcatagctgcttcttatttcaacttcaacttattcttgtttttgtaactgctcatatcgctgacaaccaccttgtcacccggtttcaatcccgatatgacttccacatattcaaaattactgtcacccaattgaactttacgcttcactacttcatccttactatcctgaacaaataattcatattcaccgcgaccgacataataagaagcattcgccaatcttaaaaccccttctttcacggcattcattacatatacatccgtcttcaagccggaacgcaatcgcttgttattatcttcattcagttgtacaatgaacgaaatcaccccattcttactcaacggtgtcacactacttaccgttccttccagtttctcattgccaatcttgactatggcacgtccacctgctgccacacggtcaccgtatgtatcagctatttcaccttccactttaaagtggctcaaatcagaaatgatagctacttgactaccttccgccacctgcgcacctacctgattattaatataggtaagaatcgctttacgcggtgaacgaatttgagcgtcatccaatgtacgtttcatttcagcaagactctttgagaaaatattgaattccaattccttcactttcaaatcagcctcttttactttcgattcatttgcgtattgctgacggagctgttccaattccagttttcctgtattgaagttcaattcagcctgacgaaccttgtccgttgttccagaacccaagctatccaaataacgttcgttgcgaagttctacctccatacggttcaatttcatggcagaaattttcacttgcattgataaatcgctcagatacgtattattattcaccttcaactgctctaactgataacgtttcatctgttcttcatccagcaatttcttgtattcggtttccgtactctgcaaatcaagtttcaaaatcggcgtacctacatccacgctgtctcctcccttacggtaaacttccacgatacgagtattaataggtgaattgataatctcttcaaaagccgggacaaccttaccggaagcactgacacttacttcaatagttccattgtctacttctgaaaacaccaaatctttcttattgacgctacttcgcataaacgaaatcaatacagctatacataccactgccgccacacctattgcaccatatttaatgaacttctttttgcgttccttatcacgcacttctttagggatttctctgtccataacttattgtaattttattattgtcatttttgtactaaagaataaacaacatccgtgccaagaaagcaacttattgataatcaataacaaacaaa

SEQ ID NO: 14412 - DNA, 60669 bp, Unknown
  gut microbiota DNA sequence
aactaaaatggcaagataaaaaattattcatataccagaagccaatagataaatgggaatactgtggagaaaaagacgaaaatggaagagtaatactcaatataggattctatataataaaaaacaataatgaccaacgtacatttatggcaataggacaagagtataatctaatctcttattcagaactaatgaatcaagatttcctttccattatatggctgaaaagaaaatatacctttgaataaatatgagtataaaacctaaatacaaagaaatgaaaactaaaataatatacaccatcgtatttttgatgattgctaaacttgcttatagccaagaagagcaatatagtgcagataagtttgtggcaaaatgccccaatgaaatattcataggagcaatattggaagccaacagcatcaatcaagacacatataagttcctgaaaatatcaatgaatcctataaacatggggtacaccattcctataaagtcacaaacaatcactccttcctataataacatgatgaaagctattcatgaagcgttaaaaacaaacgatgttttgaaaagtaactattctttttcattcgtaattaaaaagataaaatcataccaagaattagctgtcaattggggacaaaatattaaccttcagcaactattaggcatcacacccgattataagcctcaaaagaatattatattgatagatataaatcaaagttttttcagcattataatggatatgccggaatcactaagcactgatccacaagttttgcaacaattagacaagcttgcatttataaactcaatacaatttggcagaaaagttatactagttattgaaagtaatattgattatgacaaattacaagaaactattgacaatttactgaagtctaaggaagttagtcaaaaagaactagcaatattagccaattctaatatcagattgatgactattggaaacaaaggaataaaagatatcaacccagacaatccttttacaagcatacttacttatttatcttcaacagttacacccgatgatttcggaggacctatatcattttccgcctctaacataaaagataattctgtatttgttaactatttcaatgtacaataaataatcatcattatgaaaagcatccgttctattttacacatacttctaggcgtaacgctaatctgctcatgcaatgaagcaacagaattagcccatattacccctaatgtcagtcttataaaatataaagatattgttaaaatagactctttatatacatatccaggagattctctatatcagaattggataaatcaatataataagaatctggaagacaaaacatcaagatcactttcaccggaagatgatgcatttttcaataaacaatatattgtgaaaagtacagaagcaaccgttttatatggaagaaattacatatttccaggatccattttagaaggaaatagcatttcaaaccaaaattatataccggtatttatcagcaacagaaaacccataacagtatcaatgacattggcacacaatacacccaaacccactagcagaactatagaagcacccactttctctaaattaagtgattatgtggttgagatggtaaccgatggaaatttcgaacagaatcagaaattcatgttcagttacaagagatttagcttttacgatgaaattaaaaccgcattcggaacaaatattaatacaagaaaactattttcttcaaaaagtgaaagttcaacagaatacagggataaaatacaaaagtcaacaggaatgtatgttaaattcttccaatcaagtttcaccgtcaacatggatattgctcctttaagtgaccaacctattcaaggaaaaagtgaatatgagcctgtttatgtgaattcattgacttatggaagactgggaatcattgcctttgaaacagacgaatcatacgaattcgcagaaacgtgtataaaaaaagaatttgatagaatcttcagtaagaaaacaactactctgaataaagaagaagaaaaattctttgaaaatacagaattcaaagtgctaattatagggggagatagcaatctggccgtacaaacatttaaaggatatagccatttcctaaatttaatatataattcaaaattcacagaaacaagctatggtgtacctattacatgttctttctcctatgccaattcacatggattggttgaaactgaatttatcaatactatccatatagaacctttatatgtaaagccaagtcgtgaaaataattcatacttacctgattattccaacaaaagcgattatcattcgtcaagccaactttatttgtatttttataaagatagagaaaagacaaaaccttcccaaccctatatagatattatcttcaatataagtatgtttgaaaataaatgcaactatgaacccaattataaaaactggcctatgataaatgcaaattgtacagataagacagagagaattataatgagaaacattgattttaaatcaaaaatatatgttggctataattcatcatattacgaaagtacaggttccatgcctatggaacctaacgaacctatgcgaatgtggaatgcaactgaatacactcgtgaatattcgctgctcaacagcccattctatcaaataatctattaaaaaatttaatcctatgaaaaagtatttttattttgcaattgttttccttgtaatgttttcttgtgaaaacgaagatttagatgaaatttcttcgaaagcaaataatacagcaaacattgctccactaagttctctttactatgatggaatatatgaaattagagatggtaaagaggtagatttaacattacaacagtatctatcaagatccacccaagaattttatgaaatagcaagcttgaaccctgcttatacatatttaggctctgttttacaagctgaatctattaataccggagaataccgttctgttgcatatccaaatgctttaaaaccagaaatcagaattgcattctcattgcctatcaaatcaagagtaataaaacctaagtttacctcatttaatgatgcagttatagacgctatcacagatgcaggtaaagattttagtggaaaacaatcgcaagttttctcatataaaatgaaagaatttaattattacaaagaggtaaatatggcttttggagctaatataaaaataggacagcttttttcaattacaacttctgttgagagtgataaaaaacaaagtaataccgctttatttgttgatttcagccaaatctattttaatgtagctatggatatcccagatgatggaaacatatttctcaatgaaacagaacgccaaaaatatctaaatcaaaaacctgtatatgtgaattctgtgaatatgggacgaaaaggagtaatgatagtagaatctgaagaatcatatagtgaaatttctgtatcaattcgagcagcattcaatgcaggaatagtaaacggagaactatcactagactcaaagacaaaagaaatgctaaaacgtgctcagatctatatttatattataggtggtaacggagaggacgcagctaaagttgttactggatttcctgcatttcaagattttataataaaaggaggagtatatagtaaagaaatatatggagtccctatttctttctctggtgctaatgcagccgataactccatgttcatttcccaaattaagatctaatattccatgtgctgattgttatttgataagtattaacaatcagcactattttttactaatatatttatatctaatgactatgaaaacctcttatagaaaaatatacttattcctattattactaacatcttattcttgtaatgatttaacagaaacaaatatgagcatagatattatatccatgacaaaatataataacattataaacattgattcatctgaaacatttatgaaggattctattacgaatccttcataacaatacactatcaatcagctatctacaccacaatgacggatttgaagaattttccgtcctcttttaattaatatactcttacaggtttaaagctcccccagcctttttcccaataccggatgcaccacatccgatgcaatctccgccagcgggtccataacaaacctccgttcagtcatcaagggatgagggatttccaattccggcgtatgcagtattaaatcaccgtacaacaaaatatctatatcaatcagacggtcactataattacctcccgccgacttcttcatccggcctaattcacgctctatctcctgtgtttcccgcaatatatccaagggaggaagcacactctccacgcaacaggcggcattcagaaaagaattttcagaagaaaacccccaaggggcagtaacataaaaagcggaaagggcagtaacctcccctatccgctcatttatcttccggacagcaacatgcagatttgattctttatcacccagattggttccaagtcccaaataaaccctcatacgctgctccaaccggtattacttatccaaaatcaacatagcatcgccataagtaccgaaacggtaatcttccttcaatgctgtgtgataagcctccatcaccagatcataaccaccgtaggcagctaccagcatcagcaaagtggagagaggcaggtgaaagttagtaaccatgctgttggctaccgagaaatcataaggagggaaaatgaacttattggtccatccgtcaaattctttcagatgaccatccgtacctaccgcagtctctatcgtgcgcatcactgtcgttcctaccgcacaaatattctttccttcatccttggcattattcacaatacggcacgcatccgcattgacatacatctgctccgaatccatcttatgcttggtaaggtcctccacatcaatctcgcggaaattacccagtccggcatgcatcgtcacaaaagcaaagtctatacctttgatttccatacgcttcatcaactcgcggctgaaatgaagtccggcagtgggagctgtcacagccccttcgttcttggcaaagatagtctggaaacgttcggtatcttcctcttctaccggacgacggatgaaactgggcagcggagcctctcccaacgcatacaatgctttcttgaactcgtcgtgagagccgtcatacaggaaacgcagggtacgtccgcgggaagtggtgttgtcaatcacttcggccaccatggaatcatcgtcaccaaaataaagcttgttaccgatacggatcttacgggcaggatctaccagcacatcccacaagcgaagttcctcattcagctcgcgcaacaaaaatacctcgatacgggcaccggtcttttccttatttccatacaaacgcgcagggaaaactttcgtatcattaaagataaacacatctttatcatcaaaatagtccaggatatccttgaataccttgtgttcaatcttacctgttgatttgtgaacaaccatcaggcgcgactcatctctatacttagccggatgcaaagctattttatcctccggcagtttaaatttaaattgcgacagtttcatcttatctctccttattcgtttataacttcttcaatctcttgttggtcaagccattccggaaaactttccaccgacaaacagtcttccagtctcacatcccccacccgggtacgtatcagccctgtcaaatgagcaccgctattcaaagcttcgccaatatcacgggccaatgcacggatataagtgcccttgctgcacactaccctgattttaatctcaggcagattacattccagcaactctatctcgtctataatcaacgtcttggctttcaactccacatcctcaccttttcgagccaaatcgtaagcgcgtttaccatctaccttacaagccgagaaaacaggcggaatctgttctatcctgccgataaaacgctgcaaggcttcctctaccaactcgcgggtgatatgttctgtaggataggtagcatctatctccttctccaggtcgaatgaaggtgtggtagcccctaactgcaaggtggcaatgtattctttggtatgatactggaactcttcgatgcgtttcgttgccttgcctgtacaaataatcatcaccccggtagccagcgggtctaatgtcccggcatgtcccacttttattttcttcacgcccagtttgcggcaaatatggtatcttatcttgtttaccactgcaaatgaggtccatttcagcggtttatcaaagtataatacttctccttctttaaaattcatccaattacatcaatgtgcacgctatcgtaacggcaccggctatggcacaatagatagcaaaataaatcaacttacctttcttcacaatattaatcatccacttacaagctacacagcccgatatgaaagctgccagaaaacctacaatcaatgacaatacagatatatctgatgtgccggctgcagctccttttacaatcttcataccatccagcaacgcctcacccaatataggaggaatcaccatcagaaaagagaactgagccagtttcgccttgttgtctcccaacaacaaaccggtagcaatggtagtacccgaacgggataatcccggcatcacggcacaagcctgtgccagacctataataaacgcatccttcatgctgatgttctctttcaaacgaggttttgcataataagagaaagtaagaagcaaagctgtcaataacagcatacaacctacaatgagcaagccggaaccgaaaatttcttccacataatctttaaaaaacacacccacaatgccgataggaatcatggataccaggatattgatcacatattttgtctccgcattcatctcaaacttgaacaagccacggaatatccagcctatttctttccataatataaccaaagtactgagtaccgtagccacatgcactgctatggtaaaagtcagattatcttccccttgtatgccaaacaatgccgaaccgatagccagatgaccactactgctgaccggcaaatactctgtcaatccttggagcaaaccaaggatcaatgcctcaaaccattccattctttaaataaaaattgagaattaaaaattaaaaaaatcaagagttaaccacttctgtcttgtcctttggcttgcggacaatgccataaatcataaatataaagccaaagaaacatactgcgggcgccactttgatgcgacgtacactaaaaatatccggctcaaaatatccttctgtcgaactaggtcctgtcatcagcagaaaaccgacaataatcactgccatacctatggcaagcaatataaaattagttttatcaaaggcgaatttttgtctatccatatccttttattattaaatgtaatacaacgcactagctttcatgcgcaagtatttgttgattgatatatatgcacacataaaggtaataaccacaccaaacacaaaaacagaacccattaccataagcatggtcataggggtaataatctcaatcaattcgggttcatatcttaccaacgcataggccattcctatcaatgccgcatctgccatggcagcggccagtatccctatccatatattccgcaccaaaaaaggacgacggataaatccccagcttgcccctaccagtttcatggtatgaatcagaaaacgtttggaataaatggccagacggatggtgttattaatcagcgcaaaagaaataagggtaagcagcgcagccagtcccaatagcaaaaaactgattttccgtatattgctgttcactgcatccagtaaatcctgaggatagttgatttccataactttcttgttctgcataattttctgctctatccaagaaatgctgtccgaattggcataatcggcattcagttttatttcaatagaagctgtaaaaggattatatcccaagaattcagccgggtctgtacccatcgcttcgctctgctctttcaacgcctgctccttcgatatataggaagtttctttcacaaaaggttcctcattcaattttttctggaatttcaaagcgtccgcttctttcatatcatcgctgatgagtacggagaaactgatgttctcgcgtacatacttggataagttattggcagacagcacaaagaataccaccatccccaacaagagcaacaccagcattgtactgatgctggaggtaatgaactgcatatcgaaaaaggaccctgatttttttcccataatcacttctttctgaatacataaatcattgaactactgcgttcttttttcgccagtgaactgaaccaggccaacaggcccgtccacattcccttcaaaaaggacaaacggctgcctttatatctttccgtcaacatggatacataaaaagcatcaaaaggcatcggatgctgttccgctaatttaaaaccatgcttgacgccgaattgttgcatgacggaaggtgtaaaatgccataaatgacggggcacatcgtatgctgcccaccattccttatatttttccgcatcatacgaactgggattaggcacagccactatcaatactcccctctctttcaaaagtttgaataatttttcccacgtttcattcagatgttccagatgctccatcacatgccatagagtaatggcatcaaaagaatgatcggcatatcccgccaaagcatcctccgtatctacatccagttcaaaatgctctttggcaaacgcacgcgcctgcggacttttctctatagctttcacccgccatccgcgctccttcattgtattactgaaatatccggtaccggtaccaatgtctaacaaagtacctttactcaaaccggatgtccgttttatcagcttggctttgcgtgacagcatatacttgcgtacctcatggtatacacggttcatcagccccttgcggatatcagtgtgtgaaatataatcgggagtctcataatatcgccctatctcggcttccacgggtgcaccttgtgtaaaaataaagccacaatcatcgcagcgaaccaaattgaattgttcacccgaagcatagtgatccgtacaagtgattgcatgtcccaaatgttttccgccgcacaacggacaagtatttattttgagtatatccactttttgccctaatttgctgcaaaataacaaataaattgaatgagaagaactatcctttaagtacttttaagagtataagttaataattcgtttttacttttcctacatttgtgcagataacttcaaaagagacagaaatggaaaataaaaaactgacccgttccaacaacagaatgctagccggagtatgtgcgggactggctgattattttggctgggatgttacgatagtgcgcattatctattcatttgccacggttttcacagccttttcgggcattattgtctatataatcttatggattgttatgcccgaaaagaaatatcgtgacggttacgaagaccggatgaatgacaggctgcataaccgataaccggaggcattatgcaatgcccagcagttccacttcaaatattaatgtagagaaagcaggaatcggcccgcttgtacggctaccataccccatagtataaggaatataaaccacccatttatctcctacatgcatacgttgaagcgccagctgccatccctctatgacatcacacagccggaaagcttcgggacagttacggtcataggagttatcaaactctttcccgtttatcagactaccccgataatgaacggtgacaatactgcggatcgtaggtgaaactgtacccgtacctgtctgcaatactttataaaacatattacaaggtaaagaacaaataccttcctgtgtagaaagaacttgcaaatattgcaagttcttttccttatattcttcttttttccccatcagaacacctcttctcctttcaatgtagccgaactggcttcagtaatgcgtacatggacaaaatcaccgatacgatgattcccacgatcaaagactaccaccttgttttgctgtgtacggccaaaaagctgttctctggaacgcttggaaacaccttctaccatcacttcgaaggtcttacccacatcacgggcattactttcagcagaaagacggttctgcaattcaatgatttcattcagccgacgtatcttaacctcttcgggtacgtcatccggcagatgtttggaagcatatgttccgggacgttcggaatatttaaacataaaggcggaatcatacgcacattcacgcatcaaggatagagattcctgatggtcttcttccgtttccgaatgatagccggagaaaatatcagtactcagaccacaatcgggaatgatacggcgaatagccgctaccctttccaaataccactcacgggtatatttgcggttcatcagcttcaatatacgcgaactgccgctctgtaccggtaaatgaatatgcttgcatacattaggcgtttccgcaatgacttgcaaggtttcatcactcatatccttgggatgtgaagtggtaaaacgaacacgcatgtccggaaccgcttcggccactgtgcggagcagcatcgggaaagtaattatttcaccctctttctcaaaacgataagaatttacattctgtcctagcaacgttacttctttataacctttggctgccaagtcacgcacctcattcagaatactttccacatcacggctgcgctcacgcccacgggtatacggcacaatacaataatgacagaaattattgcaaccacgcataatggatacaaacccggagatatgattgccgcaaatacgggacggaattacctcacgataggtttctgtagtagaaagctccacattaatggctttctcccccgcttcaaccgaagcgaccaaatcgggcaaagtgagataggcatccggtcctacgacaagatctacatgatggttctcgatcaaatcatcttttacacgttctgccatgcagcccaacacaccgacaatcagattccgacgtttgtttttcttcatagaatggaaaaactccagacggttcagaatcttttgttctgcattgtcgcgaatagaacaggtattcataaatacagcgtccgcttcatccaatgtttcgcatacatggtagcctgccatttgcataatagaagcaatcacttcactatcagcaacattcatctggcatccgtaggtttcaataaacaattttttgttctcggaatcagttgcagatttaaagtctgctcctgttgtttctttcatattttctctgttttatggtttcgtaggcaaagatacggagttaccgacaaattaaacgaataaaagagccgaaaattggatattataagagatttatgcatttaactgttaaataattataaccagtgaacaaaaaagaccgttaacgttaccaacgtattattataattcgcatatttgcttccgaaaaacattagattttttcatagttaaggtttaggttaaaaaaataggggaagacaactgtgaagttctcttcctttttttatgtccttttatagagttggttatgaaatatttttctaactttgagcattcattatataataaggaaagtatggatatcattcaggttctcatatttatagtaatcattgttgtggctatcgtacaacaaatctcaaaagccggcaaagagaagaaaacaccttcccccaaggaagtgcttgcagatatgtttcctgaaatagagcaggaaagcatggaagaaaaggtgtctgtttctccagctccggcggttcgcaaacctcagtcctcccgtatgcagaaccagtcaataatcagaaaagcggtcgctccacctctggcagaaaataagagggaaaaccggactcctataaaactgagtactaaagaagaggcgcggcgtgctttcatttattcagaaatttttaatcgaaaatattaataacaactatactaataaagaataacacattgaatatcatgggatttaatattatttccgcagccgaagcagccagctacatcaagcatggctacaatattggacttagtggctttactccagcaggaacacccaaagccgtaacccccgaagtcgccaaaatagcagaagaagaacatgccaaaggtaatcctttccaaattagtatttttaccggcgcctctacaggggatgctacagacgggatcttgtccagagtaaaagcaatccgttaccgtgctccctacacaaccaaccccgattttcgtaaagccgtgaataacggtgaaatagcatataatgacatccacttgtcacaaatggcacaggaagtacgttatggcttcatgggcaaagtagatgttgccattctggaagcatgcgaaatcacacccgacggcaaagtatacctgacagctgccggaggtatcgctccaaccatcgcacgtctggcagataaagtaattatcgagctgaacgccgcccacagtaaaaacggtatggggctgcatgatgtttatgaaccgcttgatccgccttaccgccgtgaaattcccatcttcaagcccagtgaccgcatcggtttaccttacgtacaggtagatccgaagaaaatcatcggagtagtggaagtgaacacacctgaccaggcccgttcattcaccgcaccggatcctatcaccgaccaaatcggacaaaacgttgccgacttcctggctgctgatatgaaacgaggcattattcctgcaagcttcctgccattgcagagtggggtaggaaacatcgccaatgccgtattgggcgctttgggacgagacaagacaatccctgcttttgaaatgtataccgaagtactgcaagatgcagtagtggatctgattcgtcaaggacgtgtgaaatttggaagtacttgttcattgactgtcacaaacgaatgtctgcaaggaatttatgatgacatcgacttcttccgtgacaaactggtaatgcgtccatccgaaatctcaaataacccggaagttatacgccgcctcggtgttatctctatcaatactgctatcgaagcagacatttatggcaatgtaaactctactcacatcagcggcactaagatgatgaacggcatcggtggttctggtgactttacccgcaatgcctatatttccatctttacttgtccgtctgtggcaaaagaaggaaaaatcagtgccatcgttcctatggtttctcatgaagatcacagcgaacacgatgtcaatattatcattaccgaacaaggtgttgccgatttacgaggaaagagcccggtagaacgcgcccaagccatcatcgaaaactgtgcacatccagactataagaacattctttgggactatgtaaaaatgtcttccaaaggacagactcctcattgtatttctgccgcactggctatgcatgatacactggccaagaaaggggatatgcgcttgatagactgggcagaatataaatagtcattatttgctgttttcaatacatctccggtcagcctatatacctgaccggagtttttttatatattcctcaccttttcgtacaaaaaacaatatctcccaccattttagtcaaaaaatacacggactattctcataattattctatttttgccatgtaactaatcatttttactattttactatgagaaacagaattctatatttatttgcttcccttgtgattctgagcggttgcggtaaccaaccggcttataaaaacagtaatttatctcctgaagaacgggcagaagatttattgcagcaacttacattagaagaaaaagtagctttaatgatggacaactccaaacctgtcgaaagattgggcatcaaaccttataattggtggaatgaggccttgcacggagtggcacgaagcggactagctacagtctttccacaacccataggaatggccgcttcctttgaacccgacgccatacataccatttatacggcagtatcggatgaggcgcgggccaaaaatacagcttactcggctgcaggaagctacgagcgttatcaaggtctgactatgtggacacccaccgtcaatatttatcgcgatcccagatgggggagaggtattgaaacgtatggggaagatccttatctgacaagtgtcatgggggtaaatgtagtgaaaggactacaatgcacggatgcaaatcaaaaatacgataaaatacacgcttgcgccaagcactttgccgttcactcgggaccggaatggaaccggcacgaattcaatgccgaaaatataaaaccacgtgacttgcatgaaacttatctggttcctttcgaagccttggtaaaggaaggaaaagtaaaagaagtaatgtgtgcctacaatcgtctggaaggagatccttgttgcggaagcgaccgcctgctgatgcaaattctccgtcaggaatggggatatgaaggtattgtactctcagactgtggcgccattgacgatttctatcgggaaaaaggacataaaacacatcccgacgctgaatcggcctctgccgccgcagtattaagcggtacggatctggaatgtggttctagttataaagcattagtagaaagcgctaaaaaaggattaatcagtgaaaaggatattgatgtatccgtaaaacgattattaaaagcacgctttgaattgggtgaaatggacgatcccagtaaagtggaatggactaaaattccttattctgtggtttgctcggcagaacatgattccctgtcactagatatagcacgcaaatcaatgacgctgttactgaacaaaaataatatcctgccactgaaacgcggtggacaaaccatcgccgtcatgggacctaacgcaaatgactctgtgatgcaatggggtaattataacggtactcccaaacatacgatcaccttattggaaggtatccgctcagccatgggagagaatgacaaactgatctatgaacaaggttgcagctgggtagaacgctcattaatcagaagcgttttcaaccagtgtacttctaaagaaggtccagggttctccgcccgctattggaacaacaaggaatatgaaggaaatgcggcagccaccgcacaactcaccaccccgttccgcctttgtacctcaggagccaccgtatttgcccccggtgtgaatctgaccgatttctcggccatctatcaaagtgtgttcaccccccaagaaacaggagaggttattttcaacttttatagttgtggagctacacaattattgataaatggtgaagaagtaaagaaattcaccaacaaacatgggggcaggggacaagcttacgccatgcatgcagaagccggcaagccatacgatatagaaatccgcttccaatactttagtggagacgcacagttgaattttgatcttgggtttaaagaagaagtcaacattaagaatacggtagcaaaagtgaaagatgctgatatagttatatttgcaggcggtatatctccaagtttggaaggagaggagatgggtgtcaatttaccgggattccgcaaaggagaccgtactgacatcgagcttccagctgttcagcgtgaattaataaaagcactctgtgatgccgggaaaaaagttattttcgttaatttttccggatcacccattgctatggagcccgaaaccaaatattgtcaggccattttacaagcatggtatccgggacaatccggaggtaaagctgccgccgaagtcttgtttggagattacaatcctgcaggacgactgcccgttactttttaccggaatatagcgcaattgcctgactttgaagattataatatgacaggacgcacttaccgttattttaaaggtgatcctcttttcccgttcggttatggtttgagttataccacttttaactatgataacatcaaactggatcaaacgattaaagtaggggaaactgccaaaatggttattcctgtaaccaatgccggtaatcgtgacggggaagaagtagtacaggtatatctgaaaaaacaagaagatgcggaaggaccggctaaaacactgcgtgctttcaaacgtgtacaaattcctgcaggaaaaacagtcaatgtagaattagagttaacacccaaacaattggaatggtgggacgcgcagacaaataccatgcgcaccatagccggaaacttcgatataatggtagggggtaattctaaagatgctgaattacaagtaaagacgctgacattgcaataataactccgaataaaataaatcaagtctgcggcatttttgtcaaactctatatttaaaacaaaaatgccgcacttgacaaaataaaacatcagaacaactcaatctgcttatctgcctttatttgttgcacaaaatagttgtcatgactcaccaccaacaaagtgccttgataatccttcaaagtttcggtcaagatctccatactcagaatatcaatattattagtaggttcatccacaataaaaacatcgggggcctgtgcactcatcataagacaacagagagaaagtttcatcttctcacctccactcagatagctacatttcttgttccatgtggaaacaggaaacaaaaaacggttgagaatcgttctcaattcattatcatacaattcactattgaataaggcaagttgttctaataccgacaaatcattacgaattgtagaatattcctgatcaagataaacgtacgtcagcccttctgcctgtatcaaagaaccttgagtaggagcaagacttccggttatcaacctcaataaagttgttttaccactaccattacttcctttcaaatgaatacggtcaccacttttgatggtaaactcaagaggagaagaccacaaaggattttctccatacgaataattcacacttgaagctacgataagtatcttaccgatatgcaaagaagatgaattgaaatttactttcatcgtcttcatatcaggtaaagctttacgcagttctactgtttctcctgccaaaacacggatcttatcagcatgaacatctcctaaacggacagcacttttctcagcctgatccctgaatgtatgcattgccatctttccgactcctttcttcacattttgttttttacctcgcacatcatgcttttgttgacgctccattacctcacgtgcctgcttccgggctttttgtaattgcttttcattctcctccaaccgggtttgcagagcttctacagccaatttcttctgttctttatagaaatcgtaatttccagcataataagtgacaccttttgcagtaagctcataggtagaagaaagtaaattgagtaatgtccggtcatggctgacaaccagtatccctgccgtagcagtagttataaaacggtacagccggatacggctttcgtcatccaaatgattggtaggctcatccatcaagataaaagcaggagagtatatagtaattcctgctagaaaaacttttgttttctcaccgccactcaacaaatgcatgggataggagagaggtacttctgccaacccccattcattcaaagcagcaaccgctttctcttctattttccagtcatccgccaaagccgtaaaatgctctattgaagcatctccctgtaaaatggcatgaagtgcatataactttctttctattcccaatgccccggctactgtcaaatgattaaactgaccaaaatgctgtggaatagaataggggatatccggacatataatttgtccttcagaaggtaataactctttagttatcaatcgcatcaaggtagattttcccgaaccgttgttcccgatgagggctactttttgccctttactgatagtaaaactgacattactgaaaagcacatctttatccggatgcatgtaagtaatggactgtacatgtatacacatactctttctaagaattttaaatatgaatactgaaaagctcgtagttggaataagaagacaactattgcgcaacaaacaaaattatttcgcctgctgtcccaacgtaaaaacaaatagttgtatggaaatgaatgttttaaattctcatcggaatatttttaaatttgcgaggcaaagatagcaggtttatggaacataaaaaaatattccccaatctaaatgaatagattgaggaatatcagaataaaaaatctatttattcaaatgaaggcaaagtcacagagaaatgaggattcggagtatgctgtgttctgataatctctttcatttgtttcacaatatccggatgtccggcagcgatatcatggtcttcatgaatatctgtagcaagattgtaaaggaaaggagtcccttttttcactaccatcttccagtctcccatacgtacaccaatctgatcggtttcatcaaattcccaatacaagaaatcatgtttcttctgtccttcctgtcctaacaaagtcggagcaaaagaaataccatcaaaataatccatgtcttttttcttgttagtgtacttcttcacataattcttcacacctgccaagtcacaaaatgtaggcatcaagtcatagaaagctaactgatgatcattaaccgttccttcgggtactttacccggccaacgcacaatgaacggaatacgaatccccccttcataacattgacgtttcaatccacgaagtttgccatcacgaccaaagaaggtagggtcagctcccccttcttcatgggggccgttatcactggtaaaaatcacaatggtattttcgtccagtcctttctcctttaatttgttcaaaacttctcctacataataatccaagcgagtaatcatgccggcaaactgcgcatgggtgtgtaccgacggattatatcttgatccttcctgtccaccccaagttttatcttcaaaaaacttcttttgataacctgtcagaatagaatcttcgggctgcgccagctctgcatgaggaagcgtataagtaaaaataccaaagaaaggttgcttgccatcctgtttatccaaccatttcattgcttcttcatggatcatatccgcagaatattgcggacgtttgaaatagtccttaccaaacataggatagttgatattctcatccatcactacacgaaccactgccgtatcaccagccgatttactataccggttcaggaaattcggataatataaatgagcctgaaactgacaaatataaccataatattcatcaataccccgtttgtccggcgtagacacagatccctcatagccccctgcccatttaccaaacataccggtagtataaccgttatctttcattatttcaggtataatcacatgaccgggatcgtatggatgttgccccaccacggcatattccttattatttccatacatcacaacaggggcatcgcgccagtactctttgttcccacgtacttcacaatgtccggaatgttgtccggtcataaatgacgcacgtgatggagcactcaccggactaccggcatacgcttgtgtaaaacgcataccttctttagccatattatcaatattcggtgtactgatgtaggactgaccataacaccctaaatcaccataacccatatcatcacacataatataaatgatattcggtttaggagttttctgagcataagcgcctaatagaggaaatgctaatccactggttaaaagaaagaggtttcgatttttcatatattctgttttttactgaatttaataattactactcctgctataaacatcggcaatttagagaaaatatcctaggctgcaaagctatagaagaaaaaaatatcattcacctactctcgataataaggattcaatttcacaggaataggagcatgagtttcttgaatccacttcatcagtttctgataaagttctcctcgctttacaggatttgaacctgatagatcttgtgattctcccagatcattcttcaaattaaacagttccatagacttatcttcataatgatatatcaatttccaatcacctgaacgaatactggaataaggttttgcacggaaatctcttcccccgtttaaataagactccaaataagccggaaaatgccagaaaagatcacgttccgtctcattattatttataagcgtaaaaatatcttttccatctaagttagcaggaatcttaccctgtgccaaagtaacaaaagttggataaaaatcaactcctgttattggaacagatgaacggatgcctccttctattttaccagtccaccttataatcaacggcacacggctcccaccttcataaggcattccctttcctccatttaacggataattgtctgtcactggttccgaacctccattatctgaataaaaaatgactattgtacgatctgctattcctaatgtcttaataacttggcatatcctaccaacactatcatctagtttttcaatcattgcagcatatataggattcttatgatatttaccgggagttttattacgatatttatttatcaatgaatcaggtgcttgcaaaaccgtatgtacggcatgatgggacaaatgtaagaaaaaaggaccttcactatgagattttataaaagaaacagcttcttcagtcaaccgatcagtaagatattcacccaatataccttcttctaatcccacatgacatttacttttatcaggcagacaatagggataaaaataagaatagggagctcctgctctattaccgcccacattccatataaatccctgtgacaagggtcctgtaccgtcctcatcatcccccaaatgccacttcccgatatgaccacactgataaccctgttcttgcaaagcctcggccatagtcacaaagtcggcacagacatcttctacattgggaatagctatatatttacgtttggtacgatcaccacggtcgggaggactaactgtatatactccatggcgtggcgtgtacattcctgtcatcatacaagcacggctaggtgctgaattggcggctgcagcgtaagcattgtcaaacaatattccttctgtagcaagacggtctatattaggagtttcataataatcactgcccattacacccaaatccgtccaacctaaatcatcagccaaaataaacacgatattaggtttttcttttgtaactatatcgatagaaaagctctgttgtattcctacggtacacaacactacagtagtcaatcctattttctgaaatctcattttatttcgatttttctaagtttaaaaaccaaacaagaccgtctccatatgttattccgcatttgagacagcctcattcgtatcacactataaattaccaaccaggattctgttccagttctgggttcaataatatttcggtagtcggtacttgatacaaataatatttatctaaccaacctttaccttcttttagaggatcattgaaaagatacaaattaccttccgtcaatgaaccgtcagttccatcagaataaccagtttcaggattatataaagtcatattatttttcattgcctcttctttactcatccaaagaccagttgcaggtttattgaggaaccacggagccatacgccaacgacggatatcataaataccaaatccctcacccatcaattctataatacgttcgcgacgaatttcccataagacaggatcaaccaaaataccactttcattacctttaggatagtattttccacggttaggatcaaaactatcattaatgtcagcaaccaccattttgactacaccggcacgatcacgcaacttattgattgttttgtctgcaaccccttggtcaaatactcccaattcaaatttggcttcagcttcattcaacaggacttcttcaattttaaaaataggtttgtcagctgtattcaaattaccattattaaagctggtttcccagttatcccaattcttccatacatagtagcctgaacggcaagtcacaaatgctccagtacctaatcttggtatttcaggtacaagtgatgcactccagttctgcccaggcaaacgtttcataccaacacccgggttactgcaactttcatttgctcccataatatcaatatattcacggtctgccggattgtctgtatacgaccaggtaggatagtcgccttttccagattttactttataaggaggtataaccgtgtgatacaaacgcgggtcacggtcacgaaataccgcatacatgtccttatttccatggtagcccgatccgtcagccaaaatcggcttgccattcttcatcaaataaagatctaccgtattctggttcatctccacatagtgtgaagaagtatgttcaatataactcatgcccataggatttatatccttcacataagatttatagagaatgatacctggaacttgtcccaaatcctctgttgtccacatttcaccatatccggcaccgggttgaccgtctgttcctgtgtaaagagtaggataagcggccattaataactcggatgcgcgtacacactcttgcagatatttttcagcatcacccaattcatgatatttcctccatgtaccttcacgtaatccgaaacgcgaaataacggcacgtacacaatcttggttaatcgtattgtccccatcctgtgatgtgaaatttccaatattctgttccgcccattgcagacgttccaataccttgtcggctacggtttttctatccacacgaggtccataagcttcgggagaatcttcctgcaatacctggtccacccaaggcacatcgccaaaacgatctatcaattccatataccaaaaagaatgaaaaaaatatcctactgcacgccaatggtctttctgagcctctgtcatactagaattatcaatgtgtgaaagcatgatattgacacggcggataaatgatttaaaatcccagccattaccggatgctacactggcaactgtctgataagcaaattcattgtagccactttcatatttttgctgaaagtatcctgctgccatatcgcccttatactgtccgtcttgtccgaatccttgtaaggaagtgcgaatagtattatttgtaaacatctcataacaaggccacataaaagccttgaagttatcgtaggaattgaatgcattattctccgtcaagtctgtaacaggagtcttttccaagaaactatcattacaactagagaggctgattcctgcgagaattgctaaacttataaataatcttttcatatactcgtactaatttaaggtttataatgtaagattaagcccaaaggatactgtgcggaatgcgggataatcccatttcagcgtttccgggtcgataccctttggcaatgatgagaacgttgccagattttctacactgacaaaagcacgtaactgcgacaaagatattttggtaatccatgctttggggaatgtatatgacaaagtaacattcttgatacgcagataagaagcatcggacaagtacttgtctgactggcggtaattagagccttggttaccatagttgccataaatacgtgggaactcagcattaggattaactgctgtgtaatcaccattggcagcatctaccggttgccagtaatcacccaaacctttatataaaggaataaacttaaagtcagaatataatgggaaagtcaatgtattggcaatccatttatcgcgtttaccggttccttgcaaaaaggcactcaaatcaaaacctttatagtttaatcctagattaataccataaagataacgaggagtttcattaccaatcactttacggtcgcccggattattcaacgtattgttaccgctggaaatcatatttgtccctctttcatcatccattaagttcttgaacttcacatcacccggacgaggattatagccatctatgcttggaacgccatcctttaatttccatgaagaagtatcgacaaaatcgtctacggtataataaccatctgtttcatatccccagatttcgcctaattccttacctttataaaactcccaaaatgtatatgtttcacccgtcagcgcattcgtcttttggctgcttaatatgtaggatgagttactgtcatacttcacaatctttgacttgctgtcggacaggttaaaaccgactcggtagctcacctttccaatctggtcgcgccaattgaaactcagttcccagccacgtgtacgcatatctgccgtattctgataaggagcatccgcacctactacagcaggcaattgcacacccggagcaagcatgccgttcgtattacgctgataccagtcaaaagtacctgtaaagcgattactgaacatagagaaatcaataccgatgtctaatgtccctaccttttcccaagtaaagttacgacttaccaatgaaggaatagaagtaatagcggttacataattaccattggatatccaaccattgtatttattattcaccgccatagttggaataaacgaataagcaggcacgttctggttaccaatcataccataggaagcacgtagcttcaaagaacctaaccaattctgagtactttccatgaatttttcctgtgcaatgttccaaccggccgaaacagaggggaagaaaccgtaacgtgattctttaggaaacttagaagaaccgtcataacgtccgtttacttccagcaaatatttatcctgatagttgtaattcacacggaagaatccgccgcgaacagaaaactcattatacttgtccgtagctttcaatgtagatgtacccgaacccaatgaaggcacctcaataacagcttgtccataggataaagcctccattgtttcctgataactggattcttgattgaaacctgccattatcttaaactgatgattacccaatgagaaatcataagtaccatacaagttgattgagttatagtcggtatatcttttctttttttgtaaatagtcattggtcggagtcgtgtctttaccaccttgcacagtagtatataccacacttcccgtataccagctataatcatatatattcttgtcgaaagtatattcaaatgctatttcaaatccctttaatggcttcaatatagacttcaggaaaatacgaggattgtcatacaatgttttttctggattggaccaacgtatctgattggacggagtaaagaaaggtaatccatcgcctgcagcagaaataccttccggcatattgccttccggatagaaagaagcaagacgagtactgtaaacagcgcccaaagcagactttggctccattcttttactatgtgcatagctaaaagtggcttcctgagtaaaccattttgtaacattggcagatataaatccactgacattcattcgtctgtatttatccttgtcagtaatcagcacaccgtcattatcaataaatccggcagaaagacgataacggagcttatcagtaccacctgtcattgatatattatgtgtatgctggaaactagtctcaagcatgttcttcaccaagtccttttcattcatataataaacagccccatccgtatctttaaagataccatcgccgacagtaggaatagaagacggattattacgatattgctccaaatatcccatccatttgcttacactaggcgaacccattgtccagaattgatctccggctgcatcagaataggcctgcaaatattccatcaacggtgcctgttctggcaaattcatggcagttgcaaaggcaaagttattattataattcagttggaaagaagtttctcctttcggacgtttggtagtaaccaaaattacaccaccggcagcacgggcaccataaatggcagctgaagcagcatctttcaacactgtaaccgtttcaatatcctcaggattaaccatatccaagtctccttccacattgtcaatcaaaatcaaaggcttgatagcactaccataagaaccatcatcatttttaatacctacagaataagcgccacgaatctggaatgacttacttttacctggagcattgccatcactagacacaaacaagccgggaaccgtaccttgcaatgcatcagcagcttgtgacaaaggacgattgcctatcacttcatccatcttgaccgaggcaacggctcctgtcaggtttgcttttttctgcgaaccgtatcccactaccaccacttcatctaaagtttcagtgtcctcacgtaataccacctgaatagtttttgtatcacgtacagttacctcttgagatttataaccaatataactgatttgtaacttcacaggaaattcagaaacttctaaagaaaattttccatcaaaatctgtgatacacccgttagtagatcccattaccacaacagaagcaccaataactggttcttttgccacatccataaccaatccggtaattgcattttgtcttgattgctggggtttataaacagaaatatgctccccttccactttataacggatatttttccctacaaacaacatctcaagcacctcttccacacttttatttttaacatcaatagatactttctcattcatattaatatcattattacgaacaaggaaagagtagccggtctgtttttcaatctcataaaaaacccgactcaaagccactgaacgctgttgtatagaaagttttgcctcctgaataggcaatgcggccatagtgacatttccccatagtagaaatgaaactatccatacaagagagaggcaatgccccctacgaactttacaaaagttttttttcatacttagaatttttagttaacaattatttaagcatgtacttttcacagtactttttatctatcagttaccggtctgtaataactattgtttttcctttctttctccacataaacttattatccacatctaaataagaaagaatttcatccaaagtcagattcgtatctatacttcctgaaaaatattcagtatacactttccgagactgcacaagtatctgtacatcatattttttcccgattgttttcaaaatatcaaataacttttcattaacaaataccagtcttcctgtagtccatgctgcttgagataccgcatctatctttctcatagacaataccttatcatttttattataaacagcttgctcatcaggagaaagaagaatattctttttagcatctgaagtagtgtaaacattcacactaccttccacaaggctcacttttatttccgcatcatcaggataagaagccacattaaatgttgtacctaatacttttatattcaattcccccgtatgaacaataaaaggcttgagcatatttctagaaactttgaaataagcctcacctgaaagaaaaactttccggtcagtccgctgctgcaaagaaacatcatactttaaaaccgtccccccattcagaaaaacaatggtactatcaggcaataataatttcgaactagccccctggggaacctcaatctgacaataagaaggagtaagaacttctggactaggcgaatgatataaataaaagaatgttatactacaaccaatcagtaaagtccatatagcaacgcttctccaaacgcttattttacggaaaaaagaatgtttacgagaagaatagaaattcaatgtatcacacaattgctcaaagttttgctctttcctgcgtgcaaaccaagaagaggatgccaatgcataagaacgggctatttcacgatatttttcgcgacaagcattctctcttttcagtaatatagttagtttctgcatatcttcagacgagatttcgcctttcagataatccagcattattcgttcaaattcatctatttggctgttcattttatatctttggaattatctactatagataatacacaagcaacagacaaaacatttaagccaaaaacagatttttttcattctttttttagaaaagaaaaaataatagaatccctactctagatcccaccttttctcttattttatccatggcattttttacatgtactctgactgtattgactgaaatattatttttatctgcaatctcttgaggagtcagattggaataaagatattgctcaaaaatgaacctgcatttatcaggcaaggaagacactatattttggactgatttttccaaatcagctaattccatttcttgcaaaggcgaacactcggaagcacaaaattcttcttgatactcaagtaatgcttcacggtattcatctataattctttcacggctgtgaagcgaacggaggtaattcaaacacccgttctgaatagcacgtatcaaataagcatgaataggaaaagataactcaccacgcctataccatattttagcaaaagtttcattaactatatcttgcgcttccacagggttaaagatataagaattagcacaagcacagagatagacaaaatagctattatataaaacctcaaaagctttttcttctcctttgtttattctttcaatcaaatctttatctactatacttgcatccatctttattaagactattaatattgcaaatatagcatttcttaaaaacatcatgccaataaaactatttcttattaaaaaactctagtaataatcaactgaaaaaagaaataagttccagctcataatctgaagaataatacctaactttgtttccgacgaaaatcaaaccctaaataaaatgaacaaaaagctattattctccctgttactggcaggaacagctttcaccggacatgccgatgaggctagattactccgttttcccgctaccaatggctccgacattgtcttttcttacgccggagatctgtacaaagcacctttgaatggaggagaagcacaaaagctgacttcccatatcggttatgaaatgttcgcacgtttttctccggatggaaaatcaattgctttcaccggtcaatatgacggtaacactgaagtatatctgattccaactgacggaggcgaaccccaacgacttacctacacagcaacaaacaaccgggatgacttaggagatcgaatgggtcccaataacatagtaatgacttggacgccggatggaaaaaacatagtctaccgcaatcgtatcagtgacggttttgatggcaaactatggagcatatcgaaaaacggaggaatgcccgaagtgattccattacccgaaggaggtttttgcagctattctcccgatggaaaaaagctggcttacaaccgggttatgcgagaattccgtaattggaaatattatcgcggtggcatggcagatgacatttggatttatgatccggctgctaagaaagtagagaatatcaccaataatattgcacaagatattatccctatgtggataggagaggaaatctactttatttccgatcgggatcgcaccatgaatatctttgtttataatatccggaccaaacaaactgaaaaagtaactaactatacggattatgatgtaaaattccccagcagtaacggacaaattattgtctatgaacatggaggatacctctataaactggatcctaaaacgcgcaaatcagaaaaaatctccatcacgctgacttcagacaatatctatgcccgaaaagaaatgaaacgggtagcagataacctgactgccgccagcctttcaccggatggccaccgtctggtagtaactgctcgcggagaagtattcgatatccctgccgaaaaaggggtaacccgtgatatcacccgcaccccgggagccaatgaacgggaaggagaatggagtccgaacggtaaacaaatagcctatatcagtgaccgtaccggtgaaactgaaatctggctacaatctgtcgaagggggtgatcccatccaactgacccaaaacaatgatacttatatccgccaactgatatggagcccggacagcaagaaaatactttataccgaccgtaaaaaccgtatcgtagaagttgatattgcctcaaaagcgaaacggactgtcatgcagaatccggaaggagagttctatgaagtgaactattcaccagacagccaatggattacctatactaaatccggagctaataacatgagtgtcatttatgtataccatctgacttcaggtaaggaatatccggtgaccgaaaaatggtacagttcttcttcacctgtcttcagcacggatggaaaatacctcatattcagttccgaaagagattttaatcccatctacagccagacagaatggaatcatgcctataatcgtatgggaggagtctatatggccatgctcgccaatgacacaccgtcacctttattaccttcggatgaaatggtcagcatagaacaacagactaccgatgcggccaataaaaaaccggaagccacaaataatacagttaaaatagatccggaaggcttgcccggaagactgattaaattacctttacaagcaggtaactacgataatttctattcagacggtaaaaaagtgtggtatgccagtggtagaaataccaaagtatatgatttggctaaacaaaaagaagaaatcgtagccgaaggagcatatatggatgtagctgccaatcataagaaagcattgttctttaaaggaaataatctgtatatctgtgattttccatgcactaaagcctcattggaagagaatattaacttaagcgatatggttgctcccattgattacagtcaagaatgggctcagatattcgatgaaacatggcgggctttccgtgacggattctatctggaaaatatgcatggagtagactggaatgcgattaaagaaaaatatgctgtattagttcctcatgcaaaaacccgtctggacttgaactatatcatcggtgagatgattgccgagctggcttgcggacacgcttatgtgaatccgggtgaaataaaaggtcccgaacgtattccaatgggattactgggagctgaactgagtcgtgacaagagtggcttctaccgtattgacaaaatcctaccgggtgcaatttacagtcagaaactgcgttctccccttacagaaccgggtatcggagtaaaagaaggagattatatcacagctattgatggcatctcaacagctactgttgataacatttacagtctgctggcaggcaaagccaatgtattgactgaactaagcataaaccgtaccgcatcaagtaaaggagtacgtaaagtggtcattaaaccattagacaatgaatacccattgtatcattataactgggtacagaataatatcaaaaaagtggaagaagcaactaatggtcgtgtaggttacgtctatattcccgatatgggaccggacggtctgaatgaattcgcccgctacttctatccccaactcgataaagaagccttgattattgatgaccgtgccaatggaggtggtaatgtatctccaatgattatcgaacgtttgcttcgtgaaccctatcgcctgaccatgcgtcgtggatcaaccaaaatcggtaccattcctgatgcaacactagtgggtccgaaagtattgctaatcaataaatactcggcttcggacggtgacttgttcccatggagttttaaggcaaataaaatcggtaaagttatcggtactcgtacatggggtggcattatcggtatcagtggcccgttgccttatatggatggtacggatgtacgtgttccgttctttaccaattatgatgcaaagaccggtcaatggatagtggagaaccatggagtagatcccgatattctgattgataatgacccggtaaaagaacagttaggtgaagaccagcagttgaataaagccattgaggtaattctacaagagttaaaggatcgcaaaccattacctcccgttccggctccgagaacttataaggatttgggagtggaataaaaaatcattctttttaataaagcccgtagccatcattaagctacgggcttatctatgattttttaatataatggattttgtatcaataaatcatttttctgcatttcatccaaataaatagggagtaaataagacttatcattccatttcctctcctgcacatcaataatggaataattaggctctgtaactccataaggatagcgaatatctattccttgaacattcttaatcacttcaggtgcaatcatccaacggcggatatcaaaataacgatgttgttcataagctaattctattttacgttcattacgataatgttctttcaagacatctcccatttcagaatctggtatgtcaggcattcccgctcttgtacgaatcatattgatatacttacgggcttcagcatcttcacctaattctatgcatgcttcagcataattcaacaaaacttcagcataacgtatctgacgccaaggataaggttgtttatcatactgatgattaactgaaggatctaaaaacttacgcatataatatcctgtataagaaccattccaatcttcaatagggccttggcgagtgtctaaacctggtgtataacttccatctgactgctgataataagcagtttgtactattccttcaggatcactacctactgtatcatccggacgttgacgccaataagaaccattatacataatagaagcatagaagcgaggatctcgattttgataagggtaagctgcttgttgtggattatcccaactaaatttgctgccatctgccatttcataagaatcaactaattgtccagtaggagtatttccgccccaaccatgaaaaccattgggactattgaacaaaccaacacgaggcaattgaaaatcactgctattatgatttacataatcataatattgtaccataatatcttcatccgaattataacataagaaaatatcagcatagttttgagtagcttcctctctatttttccatcctccattttcaccatacagatgatatatacctaaatccataacagctttagcagcctttttggcccgttgccaacgttccgtacgatcacctcccacataccctataagttcaggatgctcataaccggatgcccataaagactgagaaacaaataagtcactagccgcataaagcaggacacgggctttcaaagccatagcagcaccttttgttgcacgggctttatctccgttcaaaggcaaaatagaagctgcttcatctaaatctttcacaataaaatctaccgtttcttcaaacgtattacgagctacgagtaaatcatcagaaggagtaaaagatttctcaatcaaagggacaccaccccattggctcaacaaccaataataaaaataagcacgtaaataatgcacttcacctttcaatttatcgacaacatctccttctaaagcatatttctctgcattttcaaaaaagatattacaggcacggatatttttataaagattggtccaagttatattatggaaggttataatccaaaaattaggagcaagaataccttgataactaggactcaattcactcatcactactggctggctctcccatgcccaaacctccattgactcatcgcacaaagaagaaagcattacggtatgaaatccccatttctgtccctcgtaaatattattaacaaaagaagttattaatgattcatccgtccagacaactgcatctgaataacggtctactggatccacatccaaaaaatcatcattgcatgctgttagcataagacatagcaatacaaataatccatataaacgtttcatatttttcattttatttaaaaagtaaggtttactccaaaatttatcactttattcaacggataattatatcccgatccgcttgtgttttcgggatcataatccttcatatcaggactaattgtcagcaggttataagcattaatataaacacgtaaatgttccacacctattttcttactccatatagatggtacagtatatcccaattctatattcttcaaacgtatataatcagttttatgcaaccagaatgtattctgctgatttataaaatattcattacttcgattataagtacgaggaaaatcggcatctgggttttcctctgtccaacgattatcataaaaactttttaagaaattggcaaaatcccccgactctgtcgtttgataaaaaactcctcccatagcaccttgtagtaaaaatgaaaggtcaaaatccttatatcctaaatctacattcaatccacctgtaaatcgtggagtacgactcttatcattacgaacacgatcattgccatctatcacattgtccccatttacatctttgaaaataatatcccccggacgtgcaccggcccaatgaggatacgcatctacagctgcttgatctttaaatatgccgatagcttcataataaagtcccgaatcgataggtttgcctgtggacttctgccattctggagtaccaggtgcctcatcccaaaaaagaattttatttttagcataaaccccattcaagtttatacccaaccgaaaatctttgaaatttctacgataatcaatattgaaatctaccccttgattttgtactttccctaagttttcatcaggaagtaccaatccggaagtgcccggaacagaagcatttcgtttccataaaatatcactgcgtttattatgaaaatagtcaatagtaaatgccaaatctccattcaaaaattgtaaatcaagacctatattcttttgtgtagctgtttcccaagtcacattttgattaggagctactccttctttcaatgcttggttcatcgttgtaccattattagtcaaatacatcaaatcattgaaagtataggaagccaaatactgataaggatcaatcaaatcatttcctgtctgtccccatgatgcccgtactttggcaaaactaataaagggcaatttctttttgaaaaaatcttcttcagatattacatatcctaatgaaatacctggaaagaatccgaatttattagaacgatcaaaaatataggaaccttgataacgccaaacaaactctgccaaatatttagacttataagcatagttcacacgaccaaaataatttaaacgggcttcctcataccctgtacctgtattattcatttcatcctgaccaccagcaaaaagctggtcaatagcggcagaaagaaaataacgacgataagcttcaaatgaatcccccttatccgtgatacgttctacacctgctagaatatttacatcatgatcttgagcaaatgtatggctataactagcgataccactcaataatacccccaaattatcttccattgattctgtcagacgaggatcactaaaccctttctttccttccaccaataggggctggccattttcatccatcgaagtcccatcccatgaatacaaataccaaggtttttgccatattttacgaaaacggaacgtcttatcaagtgacgcagtagccttcaaagtcaatccctccacataaggcaccttgatattaactccgaaatccccatttaacacataacgcttatcacgttcataaccagtttgattggtacatataactaccggattatcaccaaattcaatgtcgggtcccggacggccgtcaggccaataagccggtgaattaggtttagatcgcatcagcatacggaaaatattctctgcagaacgggttggatatttccgatcttccattcttcctgttacattgacataagtatcaacatatttattaattttcatatcaagattcatcttcaagtcatactgatggtaatttgacccactatgacgataaaatgcatcttgtcctttggctgatacgctaacaaaatatttcacattctctgtaccaccatcaatagtagcattggcataagtttgtggagaccatgatttcaatgtttcattaaaccagtccgtatccggatgtccccaaggatcggaaccatcagcatataatctaagatcatctaccgtatagcggcccttattaccggcatacttatctatttcattcatcaaagtagcatattccacagcattggtcatttccggtattacagtaggagcagctattccataattataagtaaaacctactctcggcttgcctgcttttcctcgttttgttgtaatcaaaataactccattggcagcttgagcaccataaatagctgctgaagcatcttttaatacagacatcgtttcaatagtacttggatcaatacgctccaaagaacgtccgggtactccatcaacaactactaacggatcagcttttccaaaggtattaaccccacgaacagtaatagtagcaccatcatatcctggttctgaagtgttggaaacagcgaccacgcccggtaaacgtccggctaatccttgtgatacattcgtcactggagtttttgccagcttctcaccacctacactcgttacagagccggataatgtagctttcttttgggccccataccccacaatcaccacctcatctaataattcagtatcttccttcaaaaatatatccagatatgtttttccatttatcggaacttcctgaactaaatatcccacataagaaatacgcaatacaactcctttaggaacagaaagcgtaaagttaccatccaaatcagttacagtaccatttgaagtacctatttccaaaatagaaacccccataagaggttcttttaatttagagtccatcaccctaccttttacagtctggttttgcgcccaagctgtattggatatactcaataccaaaaacagcaataaaacaaaacgaaatgttttcatactattatatttagaattaaacaaaggttattattatttacttgtacgaatggatacagtagccggaaccaatccgggagaagtcactttcaacattatcttaccttctttccgtgtactttttactaccactatagcacgccctttccatgctttccgctgataaccgatatagctatccgtgtctttcaaatcagcatttcccacagccactatagtacctgcccctttcacttcaaaagttaattgattatcagcattcggctccagaatgccttccttatctattatttctactgtgataaaactcaaatcctgaccatttgcctttatttttgtacgatcggccgttaattgaattttcacaggttttccggcagtctgtaagatcgttttctctatttctatctcggattccacacctaccgccttcaatattcctggctcgtatgaaacaggaaagactgctttgaattgctgttccttccctgtgaatttctcgcctatcagcttatcattcaaatacagacgtactttggaatatcgggaataaatctccacctctatttcttttccttcatgtcccggccaattccagctttcccaagtaggccagacagaccataaggtttccttcaccttaccataataattatccggctcttttacagccaagtaaagtttcttatcaggattatacaacaagtcacgataatgtgatataggtttcctccaacctgtcaaatcaatatctccacaataggccccatgccaaggataatggttacgttgatagtgttcaccttccgactcacctgcataataaaatcgcccgatacccgattcacctaaataatcaatagccgtccaaacaaaatcaccaataatataatcatgaccatttaccaacgaccaattggcaaaagcatctcgtggataagattcggtttgcataatgacacgggaaggtacacgctgatgatcaaccggcgctcgatgcagcaaataattatagcccactatttcatgtacggcagccaatggatcatatatttcccagtcattatcccaagcagctaaagcagaagttaccggacgactgggatcaaacttatgtacatagtcggccaacttccgagctgtagtgaccacttccaattttttacgctcaattacttcattgccaatactccaacaaaaaatagaaggatgattgcggtcacgaagaaccatggattcgatatcccgttgccaccattgatcaaaaagaatagaatagtcatattgattcttactgtcacgccaaccgtcaaaggtttcatctataaccaataatccgagacgatcacaggcatggaggaactcttctgaaggaatattatgcgaagtacgtaccgcattaaatcccgcagccttcattaattctactttccgttcttcggcacgatcataagccgctgcccccagacaaccgttgtcatgatgtaaacatccaccatttaaaataattctcttgccattcaagaataatccttgttcagccgaataagtaaccgtccgaataccaaaagattccgttgtactatctattacatcactcgcttcagtcactagaaagtgtgcattatataaatgaggggtctcaggactccacaaagcaggatacaacacaaaaattttttgtgttatttcctttattccattggcaggcaaatccacttttatttctccttttccggcttcatcatttcctttagtcaactttgttgtcaaggtaatctgtctgtcagaagaagtttcatttctcaaaatagtttttatttgtacaacagctctctcctcacttacctcaggagtagttatagctatcccccaatgctctatatgaacagcattcatcgctgtcagccacacatgccgatagatacctgtaccggtgtaccagcgacaatttttctgctgcgaattatccactcgtacagcaataatattcttatcatcataacgtagataaggagtcagatcataataaaaggatgaatatccataaggacggattcctacggattttccattaataaagacctctgaattcatataaactccttcaaagtaaatacccactttcttgcctttatgcttagaaggtatttcaaatgacttacgataccatcccgtccctgccggaaaataacctccatcattccccatcggattttccggatcaagggttccttctatactccagtcatgaggtaaatcaagtatcctccaatcagcatcatcgtatgtattcaatgaagcgtcaggataatcccccaacttgaatttccaatcataatcaaaaagttgttttcgatattcacttcccggatacgcatctgctccgaaacaaactccccataacaggaaaagtacagttagtaatttgatactatcccaacagactaatggtaacttctttttcttcatgctttattatttaagaatcatgaaacaaaagaagccatatcctggaaaaatagggtattgaaaccctttacagaaggtataaaatcctttcatgaaacgtttcaataccctaatgacagaaatttatcccctctttcttttatcaggccttgatatgtgactgctgatactcggtaggcgtcacgccaaattcctctttaaaacatttcgtaaaatacttaggattactgaaacctacagcgtatgccacttcagatatggtctgagtacgcgcaagcaacatcatacaggcacgcttcatctttatattgcgtacaaagtccaaaggtgtcaatccggtcatagattttattttacggtataaagtagatttggacatgttcatttcttcggaaagtctttccaaatcaaattcagactcttccagatgttgttctatgctttcaattatagactgcagaaacaacttgtcggcagacggataagctaaagtttccaaattgacgtcttcttctttacgaaaagccgcctgacgcatcttaaacgatctgataagattatccacacgggcaaaaagtactttcatttcaaatggctttgcaatataaccatccgctccggcatcataactggctatccggtcatcaatgccgttcttcgcagtaagtatgaccaccggaatatgattaaaacgcaaatccgacttaatacgagtgcaaagctcccaaccattgatatcaggcaacatcacatcacaaataatcatatccacttcatgattgcttaatttatcccaagcttgctgtccgtctgccgcagtccatacactatacttttccttaaacatctctttcatgatatagagtaattctgcattatcatctatcaacagaagggtagatttatccgtagctccatcggatgaaacgtcatcttctgctacaattgcacattcggtgatatccattgccacaccttccatctcatccactatttcatcatgcttataccccgttctgtcaatgggaagttctaccgtaaaacaggttcctttacctaattcactgtctactgtgatagttccatgatgaagattcaccaactctttcgtcaaagaaagcccgataccattcgattcgattcccacctgtttcttactactataaaaacgagtaaaaatataattgatttctttggatgagatacctattccctcatcctttattttgataaccaagaccttatttccttccttattcataaggtatacgtttactttgatacatttatattcgggagtgtattttacggcattcgataacaggttatatattattttgtctaacttatcaaaatccagataacctttaatttccaatggttctacgtcaatctctaaaattatgcctttcttttgagcaagaggaagaaaattcgtcttgcaaatattctgtataaactcactgatatttccttcggacacattcagattcatttttcccacatccatctttctaaagtccaaaatctgctgtattaaccgtttcagtttgtcggcattggatttcagtattacagactgttgtcggatagcaggaactttttgttccaaatggtcagtaacacaagaaatgactgtcagcggagttagtaattcatgagagatatttgtaaaatagttcaattttgtccgtgccagctcttcttttagtttcacttcatttttgattttaatacgctgcgcataagtatgaaaagacagatagacagcaagtacaatcaaaacaaagtaaaccatatatgccaaccaagtttcataaaaagccggagcctggacaatagccaatacaactttgccttccgtccattttccttgtccatatttccattttaaccagaatgaataagtacctttctttaactgattataaaaagcagaattcttatcataggacagatatacccaatccttatctactccatccaatttataagccatctctaccttggaattcaatgaatagataagcgatgaaaaaaatatttctatatttctggaattgggggccaaagaaatccggttgatggtatgaagtgattcatcttcagcaaagaatatacttttattttcaatttttacatccgtaacgacaggagaaaactgtatcttatccgccaatgagacactaccagactgaatatgtataaaaccacgatgcccacctacatatagccctccttgtctgtccctgcttatcgctctatacctgaatacatcaacccatatattcccatccgaagtggcataattcatacataccttctgataaatattatattgaagcacctttttgttagttataatccacacattgttttcatcagcaagcaaccccaacacagagcaatcatctatctgattatccaaagccatattttcaaatgcctctttattcgtatccgatttgaatattctccctaaagaagaaaccaaccataagcaaccctccctatctatacaggcatgatttacattttcctgtcctgaaagaactggaatacaagcttttaattcataagatatattcctatcaatacagcttaacctgtacacctttttatcagtagacactccccatatgttaccttccctatcacttgtcaaggaagacatctctggaaaatcagaacttgctgcaagtaaaatagaattatcaggacgctttacataaagccccgactggctaaaaatccataaactacctttattatcttcaaccaagtccctgatatttcccggattatagatttgtttttccaaatcaatatcctcttccaactgtatcttcataccctgatgagtcattctcattacccgtgcaccatatctgggactgatccatactccttccttaagcttggatttcacaataatgcttacttcgcccggatttgacaaattattaccactattatctgcaaatagatcttgtgacaaatcatacaggcaaagcccgtatctatcctgattgacccacattacatcatttttatccaagcaaagattcaagatattcgcatcccaacccatgtgttttttaagttgcggcaaaggataattatcaatcttcgaattatcaaagaaaatagtatatgccatatcataagaccccagccacagattcccttctctgtctttcatgattttagtgtacatcatgtgtgtatctaccaaatcatgtatatccacaggtaccaatgtaccctcttcggtatattgcaaggcgtaaagttcattataagacaatagccacaagtagccgaatgtattatcttgcgtcatactataaaagatcggttccgtttccccacttctggaattgataatatgatgtcttttataacattcttccccttctttctttggaaagaactgccatagtccttcaccccacgtaccaatccaataattgcccgattggtcttgacacatagtataaggtgcattattcttgcctaatggaggataagtaacaaaagaatctgccttttcatcatatctgaacaagcctcctcccgtaagcgcccacatatttccctctctatcctgataaacaaaattaatggcatgcctattctgttgtgagccgaaaatatcatattccttcacaatagaagccgtagaattacatctgtatattgtattaccggctcctatccaaatattgtcttctttatctgctgccatataattaatccccttatccaacaatctcgcatccggaaaaggagttattttacaggtttgtttatcataaagatttaatcctttccacgtaccgatccacacatagtgatcattatccattatatttgaaattgagttattagtgagcaaattcaggttcttataatcagcccggaaaggctgcaaacgaaaaccatcataccgtgccagcccattagtggttcctatccacaaatatccttctttatcctgatagatatcaaaaatctcattggacgaaagttgatagaaaaaaggaagctgcttagatatcatatgctgcgcacaaacagagtatttacctaaaaataaaagtaagaagaggaaaaagtacttcatagctattagatgtattgatggaaacaaagttatggaaattaattgtttggtagatgattttagcaaggaattcgtattgaaacaggaaaaataatacacctataccttaaatatctaaataatatacttgtaagttctataatcttatcctcgaaagattataaatcttacaatcttatcatcgtatatcttacaactgctatttgtataaataaatacaataaattttgtaaggtgtatacctaatatgtactactcccaaaaatgtaaataaaaacaaatatatatacatgataaaaaagttttttattttctgttctttccatatatctccacgactttcattatctttgcaaccacttaataacaaagatattaaataacaaaaatagatcatggaatacaatttcagagagattgaaaagaaatggcaacaaagatgggtagagaaccatacctatcaagtaaccgaagacgaaagcaaaaagaaattctacgtattaaacatgttcccctatccatcgggagcaggcttacacgtaggacacccgctaggatacattgctagtgatatttatgcccgttataaacgtttgcaaggtttcaacgtgctgaacccgatgggatatgacgcatacggacttcctgcagaacaatatgctatccagaccggacaacaccctgccatcaccactgtgaacaatatcaaccgctaccgtgaacagttggataaaatcggtttctcttttgattgggaccgtgaagtacgtacttgtgagcccggttattaccattggactcaatgggctttccagcagatgttcaatagctattattgcaatgacaaacagcaggcacgtcccatcagcgaactggcggaagcattttctaaatatggcaacgaagaattaaacgccgcttgtagcgaagaactacatttcaccgctgaagaatggaatgccaaaagcgaaaaagaaaaacaggaaatcctgatgaactaccgtatcgcttatctgggcgaaacaatggtgaactggtgtccgcaattgggaactgttcttgccaatgatgaagtagtagacggagtttcagaacgtggaggtttccctgtggtacagaaaaagatgcgtcagtggtgtttacgtgtttcagcttatgcacagcggctgctgaacgggctagacaccgtggactggactgattcactgaaggaaacacaacgtaactggatcggacgctcggaaggtacggaagtacaattcaaagtgaaagacagcgatattgaattcaccatctttactacccgtgcagataccatgttcggcgtaaccttcatggtattggctccggaaagtgaactggttccccaacttaccaccgaagcacagaaagcagaagtagaagcctatctagaccgtaccaagaaacgtacagaacgtgaacgtatcgccgaccgccgtgtgaccggtgtatttagtggctcatacgctgtcaatccgtttaccggcgatgctgttcccgtatggatcagcgattatgtattggcaggttatggtacaggtgctatcatggcggttcctgctcacgacagccgtgactacgcttttgcaaagcatttcaacctgcctatcgttccgttggtagaaggttgtgatgtaagtgaagaaagtttcgatgccaaagaaggtattgtttgcaactcaccccgcaaggatgtcactccttactgtgacctttctttgaacggactgaccatcaaagaagctatcgcagctaccaaagaatatgtgaaagcccacaacctgggacgtgtgaaagtgaactatcgtcttcgtgacgccatcttctcacgccagcgttattggggcgaaccgttccccgtatattacaaagatggtatgccttatatgattgattcctctaaattgccacttgaacttcccgaagtggctaaattcctgccgactgaaacaggcgaacctccattgggacatgccaccaagtgggcttgggatgtagaaaaaggcgaagtagtggaaaatacgttaattgaccatgtccatgtattcccacttgaactgaataccatgccgggctttgccggttcatccgcatactatctgcgctatatggacccacataacaaccaagcactggtatcagaaaaggcagatcactactggcagaatgtagacctctatgtaggtggtacagaacatgctaccggccatttgatttattctcgtttttggaataagttcctgcatgacctaggcgtaagcatcaaggaagaaccattccagaaattggtaaatcaaggaatgattcagggacgaagcaattttgtatatcgtatcaaagataccaatacatttgtgtcactgaacctgaaagaccagtacgaaaccactccattgcatgtggatgtgaatattgtatccaatgatattctggataccgaagccttcaaagcatggcgtcctgaatataacaacgctgagtttatcctagaagatggaaaatatatctgtggttgggcagtagagaaaatgagtaaatccatgtacaacgtagtcaatccggatatgattgtcgaaaaatacggtgccgatacgctgcgtatgtacgaaatgttcctcggtccggtagaacagtccaagccttgggatactaatggtatcgatggtgttcaccgtttcttgaaaaaactgtggaatctgttttatagccgcacagacgaattcttgcctgtagaaagtgaaccgactaaagaagagttgaaagcaattcataagctgattaaaaaggtaaccggagatattgaaactttctcttacaacacttctatcagtgcatttatgatttgtgtaaacgaactgacttcattgaaatgccgcaataaagaggtattgagcaatctcatcatcctgttagccccgttcgctccacattatgcagaagaactttgggaagctttgggaaataccaccagcgtatgcgatgcacaatggcctgcattcaatgaagattacctaaaagaagacactgtaaaatacactatctctttcaatggtaaagcacgcttcaccatggagttcgctactgatgccgataacaataccattcaggcaacagttatggcaaatgaacaagcccagaaatggattgaaggcaaaaccccgaaaaaggtaatcatcgttccgaagaaaattgtaaatatcgtattataatcgatactatacttgaggtgtgtcaaaagcagtaacttttgacacacctttctactttatattaaaaacaatcctcattaccatggaccaaatattaaaaatcaaactaggcagagaggtaaaagactatttagccattaccttcggactgatttgctatgcactgggatgggcggctttcttactgccttatcaaataactacaggcggagtaaccggtatcgcggcaattatttattatgctacgggaatagagattcaagtgtcttatttcatcatcaatgctgtttttctaggattcgcattgaaaatattaggacctaaattcagtctgaagaccatttatgccatctttatgctgacatttctgttatggctctttcaaacattgttgaaaggtccggatggaacactaccgcaattattaggaccaggacaagaattcatggcttgtgtagtaggtgccggcttactgggatttggtatcggcattgttttctgcaataatggaagtaccggtggtacggatatcattgcttggattatcaataaatacaaagatgtaacccttggccgcatgatgatgtattgtgatattgtcatcatatcctcctgttatttcatattccatgattggaaacgagtgttgtttggtttctgcgtattgtttatcatgagcattgtgattgattatgtaataaacagttcacgccaatctgtacagttccttattttctcgcgcaaacatgatgaaatagccgaaggaatcaccaaacaaatagaccgtggagttaccctattagatggtacaggatggtatagcaaacaaggaatcaaagtcgtagtggtattagccaaaaaaagccagtcactggatatattccgattggtgaaagatattgaccccaatgcatttatatcacaaagtaatgtggtaggagtgtatggagaagggttcgacaaactaaaaataaagtaactaaaaaataatctcttaccattgcttcatcgttctgtttctgcattgaaaaacagaacgatgaagcaatgataagattaccacatatcggttatcctattctctcaaatttctattttatacaatacatgtctgcatagccaatgctcttgttccaccaaaggatgatcgaactctttttcaaaatgcattcctattttctgcatgacccgtgcagaacgtttattgggtatggcagtgaatgaatataccgttttaaaaggtaaattatcactcgcataatccagacaggcagaggcggcttctgtggcatatccctttccccatacatcccggcacaaccgccatcctatttccactccgggagtgaaatccgattcgaaagcaatattatgaaaacctacatagcctagaaaattccgagtttttttacattctacagcatacaaaccataaccatattcttcaaattctttccggatacgacaataaaaagccatcgtctcttcctgtgtcaaagtagtgataaagaattccattacttctttatcactgttcatgcggacaaacggaagaatatcttcctccttccagtcccgtaacaacaaatgaggcgtttctatatataccatactatcaagtatcaaatgataccaacgaagataatcaaaaattgaaaataaacatagcaaacaaattattatttaccttttcacctatattattctgtcaggaattatcttactttggttcattctcagtatctttgcattcaataaatacaatataaaatgaaaaggaaattagtatttgctacaaacaatgcccataaattggaggaaatctctgctatcttgggtgaaaaggtggaattattaagccttaaagatattaactgccatgctgatatccccgaaacagccgatacactggaaggtaatgcgatgctgaaagcggaatatatttttgaaaactatggtctggactgctttgccgatgatacgggcctggaggtggaagctttgaatggtgcgccgggtgtttattccgcccgttatgccggaggtgaaggacacaatgcggaagccaatatgcaaaaattattgcagaatatgcagggagcccccaacagaaaggcacagttccgtacagctatctgcctaattctggatggaaagaagcatttgttcgaaggaattgtaaaaggtgagattatcaaagaaaaacgaggttcgtcaggtttcgggtacgaccccatctttgtgcccgaaggatatactaaaacttttgccgaactaggcaatgagacgaaaaacaaaatcagccaccgtgcgctggccgtagagaagctttgccgatttctgaaggcgtaaaaaagtaaaactgtataaaattagttatatcatttgtttacttccatcgactctcataaaaataagtattttgttttcctttgaaaacaattttgacggaataatgatttccatgagaaccattatcccgtcaaaacaagtctttaataaaacagaaccagcaatgtcactcctattccgatgatacatcctatcataaatcttttccagaagaattcccttttacttttaggaacaacagaaacgtcttttatcaaccatatcttgttatcttttacaaaagtcataatcccagcttctccgaaatttccagcatcttcttgataggtttcaccgcctcctcagctattgcttcatccactgccacttccggccattcatattttaatgtattgtacaacttttccatcgtattcaaccgcataaaattacattcattgcaagcgcaggtactgtcttcgggaggagcgggaataaagtttttttcaggacatttcttacgcatttcgtgcagaataccgctttccgtagcaacaataaaatctttcttgtcgctagtaatggcatattttaaaagtcctgccgtagaagcaaccttatcggctagtttggaaacggctcctttacattcgggatgaaccagaatggcagcgttaggatactgttttttcaattccagtatcttctccacagaaaactgttcgtgcacatggcaggcaccatcccaaagcaacatatcgcgtcctgtaatcgaattgatataattacccagatttctatccggaccgaaaataatcttctcatctgccggaaaactatctacgatttgcttggcattggtagaagtgaccaccacatcagtcaccgctttaacagccgctgtagtgttaacatacgaaatcactgtatggtccgggtgctctttaacaaacttagcaaactcatcagcaggacaactgtcagccaatgaacatcctgcattcaagtccggtaccagcacttttttatcaggacaaagaatcttagccgtttcacccataaagtgaacaccacacatcacaatgatatcagcatccgttttagccgcccattgtgccagcgccaagctgtcacctacaaagtcggcgatatcttgtatttcgcccgactggtaatagtgacctaggataagcacattcttttccttacgcaacttatcaatttcagtcttcaaatccagagttttgtctaccggttcggtaacatacccttttttcaaccattcttctttattcattatatctatattttttcttcttctttcaaaaaaagaaatatggtattgataatagtctgttcatattgttagtaaaaatagtactcttttccttgcctgataagttattcatttgtaatagtgagatatgaataagtaatcaactggcttaagcactgattatactgtctttacttgttctattaacaaactgttgataatatgcaaagttaaaaactttatggttatgaatgcctataatagtgattaaattgtgttgatattgattgtttaagttatgtgattaatttttggattgttgattttaagtgtatgttataccattatttgaaatatgcaagaaatacttttgaaatgatatcctcatcctttttacatgttttcaaccgttatcaacagggggatgtgaattagttattatctttttttgtataaagaaatccaattgtaaaacagatggatttgggactgaagtaaaaataaaaagagagtaggggagacttttttttcattatataggcgtaaagatcatagatttttatgtaagtttgtaaccgttaataataaagtagaaaatagagtatgaggaaactcaaaataacagaactgaaccggcttactgtagacgaattcaagaaagccgataagttgcctttagcagtggtgctggatgaagtacgcagtttacacaacataggatcagtgtttcgcacatcggatgcatttttggtagattgcatttatttatgtggtattacagccactcctccccatcccgaaatgcataaaacagctttaggagctgagaattcggtggagtggagatataaaaagaatacgcttgatgccgttcaggaacttcatgatcaagggtttaccgtattggctatcgaacaggtggaaggcagtactttgctggataaactggaactggatgccgataagaaatatgccatcgtaatgggaaatgaagtgaaaggggtacaacaggaagtagtcaatgcctgtgacggatgcatcgagattccccagtatggtacaaaacattcgttaaatgtatcagtaacgacagggattattgtatgggagtttgccaataaattaatgaaattcagataataagagtaaaattcaaacagtaggaatcagttagatttgtccgttttcaactaacaataccacccgttcggtcagtcgatcctctccttccggatgatattctttcttcaggctggcaccaaaaagtgctgcaaaagtttgatagaatccggctttaaagggtcccataaaagcttttaccaattcataagaggaagaatccgtctgacggtttactaactttatcaacagtttgccctgtgaaaaggttaatttcttcataatcggtgtatattgctcttttaatcccttctctacgagtttcaggtgcttttccctggcttttttgtcaggcaatgtttctatatattcgtaagtttctattacagcacggttaatttcacgggctaatggcagggttttcttcacattccttaccaagcggtagtattcccgtctttctttttcgtttttgaattttaatggtctgaaaatgtatacattaggtaactgtacagctggaatagtatctcctttgtatacacatacaggtaccatgtatccgtttatagtagtcgtttgttgctgggaatgagcagcaacggctataaaggaaaaaaacaatgctataaagagtttccttttcatcttggtgcaaaagtagcaagaaatatgattactctgtatagtggataaaactatttaacttaaaacacgccaatgaattacaaaatgaacaggttgttgaaagtaatgttaattatctgtattacaatacttttgtcggtgcataacctgtgtgcgcaggaagtatgggaagaactggtagagcaattgatggatgaagatgaaaacagttcgtttcaatgggatactcactttgaggagctttccgaattacgtgaaaatcccatcaatatcaatacagcaactaaagagcaactggaacgttttccatttctctctgaccaactggtagagaatatattgtattatctgtacaaatatggtcctatgcttacccgcaatgagttatggatgattgaagatattgacaggcagactattcactatttactaccctttatttactttgaaactcctgaaaaagagcaatataaaccaaatataaagcggatattgaaatacggtaaacaagagttatcaacacgtgttgatattcctttttatacgaaggccgggtatcaacagtacccggcagaaactttaaaaaagaatccgaacaaacagtatttgggatatggatattatcataatctgcgatatagttttcattatcgggatcagatttatgcaggaattactgctgaaaaggatgcaggagaacctttctttaccggacaaaataaaaaaggttatgatttttattcactatacttgttaattcgtaatataggtcatatcaagactttagctcttggtaattaccgtgtcagctatggttatggactagttatcaacactgatttcgggatgggaaaaacagctacactctctactttgggaaataagagccggggaatacgcaagcactcttctaccgatgaatataactattttcaaggaatggcagtcagctataagttggcgaaaagatggacattggatggtttctattcttatcggaagatggatggtattgttgataaccagtttataaggtcgttgaaaaaagatggatatcatcggttgtatcgtgagtttgagaagaaaaatacattaactaatcagttggttggcagtaatttaaattataatggaaagtactgtgagttaggattaacagctgtttataatgttttcaacaagccgttgaatcctgagaagaagtactataatatttattatccccgtggaaaggacttttataatgtgggaggagattataaattcttttggaaacgcttctctttattgggtgaaacggctatagacaaatgtggtacttgggcaaccatgaatatgttacgttattcaccgaaaggaggaacacagttaatagttatgaacaggtattatgatgccaaatatcaatcggtttatgctcgttctataggagagggaagtacggtacaaaatgagagtggattttatataggattggaaaccagtattttaaagtatatcaaaatgacttgttatggtgattttttctatttcccttggaagaaatatttagtaagcaaagcaggaaccaaaggattggacggattactccaattaagttattcacctacttatgaactggaaatgtttataagatatcgttataaaaagaaggaaaaggacttcactgctgaggataaaaccaagcaaactattccatctattcagcagaaatgccgataccaattgaattatagcgtgaaagataagctgacattgaaaaccatagcggattatgtacgcatcaactttcgtgggcaatctgcttccaatggttttctggtttctcaaagtgctgcttataccttccatttgcttcctcttcagcttgatttgagtgccgcatggtttaacacagatgactataattcccgtcttactatctatgaaaagagtgtgctctatgctttttccatgccttcattctattataaaggtatgcgtgtggcagtgaacgcccgttatgaattgaataaacacattatcttgcaggccaagtacggaactactcattatttcaatcgggataagataagttccgccttggaggaaattgacggcagtacaaagagtgacctttatttgcagttgaggctgaaattctgaaaaacattctgtatttttgtactgttatcaactgaaaaaaaaactatgtcaacaatcatttatccttctcccatcttcggtccggtacatagtcgtcgtttgggagtttctttaggaatcaatcttcttcctgaagatggcaagttttgtaccttcgactgcatttattgtgaatgtggttttaatgaagatcatcgtccgaaaaagaaactgcctactcgcgagcaggttcgtgaagctttggaggcccgtttgattgatatgcagcaaaatggtcctaaaccggatgtgctgacttttgccggtaatggcgaaccgacggctcatcctcacttcgcaggaattatagaggatactttggcactgcgtgataaatattttccccaggcaaaagtgagtgtattgagtaactctacttttattcacaaaccggaggtatttgatgcattgaataagatagataataatatattgaaactggataccattgatacggattatatccatttgacggatcgtcctactggacattatgatgtgcagaaaattatagaaggcatgaaagctttcaaaggaaagctgattattcagactatgttcatgaaaggtacctatcaaggtcaggatgtgaataatacgacagaccggtatgtgttaccttggttggaggttgtgaaaaagatagctccgcgtcaagtgatgatttataccattgaccgcgaaacgcccgatcatgatttggaaaaagctactcataaggaattggataaaataggaggattggtgaaagaggcaggtattccggtttcggtttcatattaagtgaaaaaagtaagttaacttcgaggggcaagtaagttaacttactttgctcatgaacatatcttactttttcaggtcagtaacaatgtataacctactcctcggatatttttcaattcaatgcgaggttcatctttcaacagtttccgcaatttcgtgataaaaacatccaggctgcgtgatttaaaataatcgtcttccgtatcccaaaaacggcttagaatagcttttctttccacagtttcatttatattcttacagaagagttgaagtatttttgcctcgcgtacagttagcatctttttttcttcagtttcatcattatacagtgtggcatgtttggcatccagtgtgaaacgtcccagtttataatgttcattttcattgcgtgatttggttcctgcttttattttaagaatggcatgtatatgcgcatcgagttcatcgggcacaaagggctttttcacatagttattaacacctagtttatatccttcttttacatctttgggagaagtcaatgcggaagcaaataaaataggagtatctccatcagtttcacgaatacgctctaccatttgataaccgttcattacaggcatgtcaatatccgaaataatgatatccggatgatattcttcccaagccttcaatccttcttttccattcatagcagttatcacttcataaccaccaataatttcctgtaatccacttttcacgatataactgaaagtgggatcatcttctactaataaaagtttaatcatagttcctccataattttaggtataaacaaagtaaattctgtaaaatctccttctatgctgtttacatatatttttccttcatgtgcttcaattacttgataaacatagtttaaacctaatccaaatccggtagctccaccaaatttagtgcgtttagttgctgaagcacgttcaaacttgtcgaaaatggttctttgatctttctctgagatacccattccgttatcatatatttttataatggtatatttatcatcgtaatgcgaacttatttttatttcaatactctttttggaatatttaatggcattatctatcaagttgctcataagttctttaaaaaattcttcatcaacatatacttctttggcttttaaatcaatagtgaaatgaatgggtttgtcagattttgttataaacttctcttttaaatcctcaataataggttcgaatgagatttttttcttattcatttccaatttatgattttctagttttgataatgtaagtatcttattggtcaatgctaataaatgatctgcttcattttctacgatagtaaaatatttctctttcatttcaggtttgtcatccagtcttccactgtgcagaaaactagtacacatcgtgatagaactgagtggtgttttcatatcatgaatcatggcataagaaaaatcttccctgagttgggctattttattttgtctggcgatgatttttatttgatatacaatacatcctattacaaaaatcatcaatatgacagttgctattagcagtaaccccatacgtttaataattgtgtaatatgggtttattaaaatcatttgcacaccttgtgataaatctgtccggatcggaattatatctgtttttataatcccgaatgaatggatatctaaatcattcttgcttttattcagaactttttctgtgtcagtattcagtaggtagatagttattgtactttcaatattagtagcttttaagaaatcattggcgagggaatcaacattagttaatgatagttctaatcctagttttaataatccttcgttcaaataggctatttccggtacaatttcgttagaatcttttattggagcaccatttatcattgttcccttaggtgttttttcaaatctaatagaagcttccctgtttaaggacttctttaaaatgtcattactatctttatatatactttgtgaaaactgtatatatgcattacataaccatatagtttgtaaagctataattgctattaatccaaaaatagtgagtattttaatgtgtctacctttcatgtttatttttttgcaaagataataacatatttctaatgttagataacaatcggataacattttattataaaaatagcctgtatatttgcaatgtaaaacaaatgtaagtcatttaaattaaaacaataagttatggaaaatattattttagaattgagaaaaggagaaaaagaaaatatttatggtggtgaaggaagagttgtttatgtattgaatgaagaaggtaagtgtatacccagatatataaacaattaacatagagataacacttcaataacaaagagttagaaaaaagcaatttacctttgtcgcatcaaaacaaacccaaaaagagagatatggaaaaaacgagtataaacgaacaaggtggggacgtaaatcacatgaccggtataccactttttactgtccgcttgttcaaaagaagaatcagagattgccctaatattgaaatagggaaaataataacacgaacacagaacatgataagaattaaatgaaatgaaaacgctgacgttagcagaatgtatgaatatttatggtggatgctacatttacagtagcagtactagtctgactagtgtatttgtagtacccagccgttttagagaattatttttttagtatataacaacaaaacacaaaatgaagtatgaaaaagaatgattattgcatggtgaagccactcagtggcgaggaatatgcacagatatcgggaggttatgcgcctcctacagcggaacaaatgagaaatatggactgttggcagatgttatctgctggtaggtttttatataagtacaattttattaactaatgtaaatcagtatcagtacttcctattgatttgcattaatagaaaactatatgaatatgaaaagaattgtatttaaaatcgcaaaatcattttgcgcttgctttattacattgttgttctttagttgtagtaattccgaatctgtgatggaaaaagaaaggaaaagtactgtgattattgatatcaaacaaaatggactaggttatgaattgaaaagcaaagaggttccttatatcactcgtgcctcaggtcgaaatatagaacaattttatttatctgtttatagagaggataatagagatataaaacttgatgctattttggtgaaagaaaatatagacgaaaataattatatactttatcactacacgactgatgaagtactatttgcaacattatatatatctgataataccttgaaagatataaaattggaatttgatgatgaaaatttagtaaaaacaagaagtcttgctagttggtatcagtgtgccaatgatgaataccaaaattataaagatttttatgagaataaccaccctatagcatgtgatattggcgatttgttttttggagcatgtactgttggtggagtactaggcagtgcaatttattgtgcattttaaaataacaatcagtatggaaaaagaacatatatcaacagtccttttattatcggttctgctaacttttatgtgtcctgttttaggcataattcctttataccatagtatagaggcttggaaaaagaatagaaagtcagatgtttcctatgtcatcagtttaaaaaaagcatatagctggacaaaaagaatttttattgctttgctgataatatggattgttgcagcaatactttttttcggaggatattattttagatgataaatgatatgtcttgtacgacgatttaacattaatctaaagataataatctgataacaaagagtttgaaaaagtagatttatatttgtcgcatcgaaacaaccctaattactcagtatgctaaatatgtagctggtgcggtcggtggtgcaggtcttggtattttgacaggagccggactgtttcgggtgaagctttgggtggatacagtggagcattagtaggtgtggcaacattctgttgaatatgaaaaagagtattctgtatattgtatcagtatttttacttgctatagctttatttctctatgagggagaccgggctaagttgattcccgtatgctttctttttctggtagcgatacttaatattagtgtaagaaaaaaagaagatgataaagggaaatagtacggatattaatgtaatatgacagtttctgtatatgaatgttcttggagctattttagagaattattttcttagtatataacaataaaacacaaaatgaagtatgaaaaaaaatgattattgcatggtgaagccactcagtggtgaggaacatgtacaggtatcgggagagtgtatgcctcctgctgcggaacagatggaacaacttcgtaaaatatatggaccattagcggatattatctgctggtaggcttttagataaatacaatttattaactaataaaaaaaatactattatgaaaaatttagaaaatagtgctttgatgcaggaaatgaatgtgaatgagatgcaagaagtgaatggtggatgggtcgctttagctcttgctgtggctggtgctgcaatttatgtatacaataattgggatgatttttgcgtgggggttaatgagggatggaacggaacaagaaattaatcattaaagtattattttatgaaatgtgtttatgaagaattatctgagcaagaatgtaaatgtttttgtggtggagataaagcaatgagaagtttggggaatagtgtaggttctataggagcaagtatttgtaattttttagaatattttggtcagatggcacaaaatagtccaacagcttatggataaaaacgaatagataatgaaacaaacggatttacaaaaggaaaacaaaaaattgaagcgaatcaattttatcttgattatttatgtggttatatcaattgttattcaattatataatatactagtatgattaattttaaataagaatttattagtcaggattgcttataagctttcctgactagcaactagatatcgtaattatgagaaaaaaacatagattgcttcacttgatagtaggttgtctctttatcataataatgctgctattccggacgtattaccgtccttgggtatatacaaatcatttatttgatttctatcttgccgatacatacactaatctgtttggtgaatgtgttgttttttttattcttgtttctcttttttctcctaatgaaatgtacaaaccgattaagttgcttttctattcttcatgtggattgatgatatatgaattattgggattgatagtggaagggggattatgtgattataaagatataattgctacttttgttggtgccttattgtcttatgcaataaatagaatgattattagtaatgcgaatcagtagttgatttctgattcttgttttaaaaaattagataaatgaatgcgatggcaatttttcccatcgtatgtac

SEQ ID NO: 14413 - DNA, 852 bp, Unknown
  gut microbiota DNA sequence
cccgtaatcatagacgcaggggaaacacgctattgggtgcgcaagatagaccgcttgcagtccgatgataccgacttcctgcaaaagctgaaagcggagatacccgcctttctccatttcctgcaacacagaaaactgtccaccgaaaaggaaagccggatgtggttcaaccccacattgctgcatacagaagccttgcagaagattatccgtagcaaccgcaatcggctggagatagagatgtcggaactgctgcttgacattatggttgcaatggatgtggatagcgtttcattctgccttaacgaccttgtcgtactgctggtgcactcgcaggtaaaggcggaaaagcaccaagtgcgtaaggtggtgcaggagtgctggaaactgacacctgcaccaaacgggcttacctacaccacctatcagggcaattacaacagaagttgtcactatgagccgataaagagggtgggacgcttctacaccgtcacaaggaagcaactcgaatccctgtaatactatcatttttctgttgaattgttgaatatgggtataaatacactgacaataaacgatatacattctcaacaaaatctcaacaagccaaaagagaagttgagagaccaccgacacccgtttgtggatttctcttttggcgagcggtttgttgagaagatgttgagaggttacgaggttgtatataaacatattacattgacaattcatcaaatcaacaaattttcatcaacttcaaaaccgtatgtaatatgacaatccaagatgtaaagcaaatcaaactggcagactatctgcaaagtctgggctatacgcctgtaaagcaacaaggca

SEQ ID NO: 14414 - DNA, 81919 bp, Unknown
  gut microbiota DNA sequence
ccggcttcggaacgcaaggaactggtggatgatttcagacggggaaaggttaaagtgctggtcaatgtggatatcttctccgaaggcttcgactgtcccgatgtggagttcgtgcagctggcacgtcccacgctttccctggcgaaatacctgcaacaggtagggcgtgggttgaggagatcggcaaacaaggcgtcctgtatgctgatagacaatgtgggtctgtaccgcatcttcggtttgcctgcccggaaccatgactgggcggcgatgttcgagggacggatgattggcaacgcgctgtcccgggcacggatggaaacgggcaggctgtccgtatccggcccgctgccggaagatgaaaggcagcgggaggatgaactggaggtggtgataacgcacgaccggctgatggacttccttacaaaccggagggattccgcaacagagaaagaaggacagcccgttttgaaaagttattatgacagacaaagcgggctttggggattgaggcgcggggagaggatgacggtaaggccccggtatccggaagtgtttgatatttgtggagactgggcggcagtgagattcgggaataaccgggcaggtgtggtgaatgagaccggacagtccggaatacagctggaccgctgccggaaaatgaagttcatgaaggaggatttgcttgccgtgacagactgtgcgggcaatgaatcttacatcgacctgaaggtaaacagaacctatcgggagaaacccgtggtgttgtcattcggctgtatggaattgccatacggcggtgtggagctgctgaaggtgggagcgttctttttcagccgtaccggaaaaccgtatgtcaccatgcgcggggtggatcagaacggcatctacttttatgatttttatctgaagataccggattaccgtgttccgaaggactgccaactggtggatcctgtctggactaccttgtttgatgttttcgcctgtgtgctggcaggggatgaggaggaagtgtattggtgctgtggccgtctggcggaccggagcattgtggtgatggacgggaacgggaattattatcatgtggaaaaagggaaggaaaagcggtatatagcctgtaacgctccccggccgggcgaggaagatttccatacagtgatggaacgtctgaaggaagaagccgggcggcgtgccgggatagctcaacggaaacaattgcaggaagaggaacagaaaaggctgaaaaggttggaagagatcagggatgcattgcctttccggatggggatgaaatggggcttgaaactgggggaacgtatcattgtgcctcccaaatacaggaagattctgcctcctgtgggctattattgcgcttacgaggaaaacgcctgccaatggggaataatggctctggacggaaaagtggtggtggaggccagataccagaaggtggatatagaatgcaacggtacggtgcatctgacggtgattccgggtaaggtgaagaccataaaactctgagcgtctgccggaacggagtgcaaatggcacaaataggaaccgggataaatttgtgtcatttgcgtcatttgcattctaaatagtcatcactaggtaatttaacactatgccttaagcgaccggttaatgctgtcaatataatccagaatctcctgtctgcctgttttcttttcagaggaggatacgaaatgaggagggagttcttcccactgttctgtcaattttttcagatatttgtttacattatccttaaccttgccattggtcagcttgtcggctttggtgaagatgatagagaagggtactccattttctcccagccattccatgaattccaagtctattttctgaggttccagacggcagtctatcaatacaaacagattggtcatttgctcgcgttccaggatataatcctcgataatctgctgtatcttttctacctgtttcttgccccgggaggcatatccgtatcccggtaaatctaccagataccattctttattgatcagaaagtgattgatcagcaaagtcttccccggagtggaggaagtcatagccagtttgggacgtttggtcaacatatttatcagactcgatttacctacatttgaacggccgataaatgcatattcgggcaggttgtcctgcgggcatttctctacttttgtgttacttactacaaattctgcactgagtatttccataattctttgtttttatacttaaacaagtcagccccataaaagtcaggaagccgttaaacattaacatttcatagccaaactgatagccggtggaggtgaacaccagccggtctatggcatagcataatagcggcgaggcgatggctatgtaaggaacaaaacggtcgcgcggccgcattggggtgaacagcccgaatgcaaacagccccaataacgggccgtaagtgtacgaggcgatggtatagatagcgtcgatgacactcttgttgtttactgccttgaacagcaggatgaatccgataaagaggactgatatgcagaagtgcacgagcttcctccgtctttccgcttctttgccggacaaatggcttatgcccgctatgtctatacagaagctggtggtgagggcggtcaatgccgaatcggcgctggaaaaggcggctgcaatgatgccgatggtaaagaatatcagtacggcgaatcccagatggccttccgccgcaaacaagggcagtatctcatccccggctgccggcagggggatgttcagttgcgaggcgaacaataacagcaggattccgagtgacaggaacaggaaattgaccggaacgaatgagatgccgtagcaatacatgttcttttgggcttcatgcaggttcttgcacgacaggttcttttgcatcatatcctgatccagccctgtcatgacaatcgtgatgaagatgccgctgaaaaactgcttgaagaagttctgtttgctgtgccagtcgtcaaaaacaaagatacggctgtgttcattttcccggatggcatgtaccagtcccggaaaatccagattcagttggccggaaacctcataaagtattaatcccagcgccagcagcaggcagagtgtctgcaagctgtccgtccacacaatcgtgcgtatgccgctgcggcgggtgtatagccagatcagtaagacaatccctatcaccgtggcggcgaaaggaatatgaaaggcgtcgaatacataatgctggaggataaggcataccagatagaggcgtgctgcggctccgatgattttggacagaaggaaaaaagaggctcccgtcttataagcgtgttttccgatccggtctcccagataagtgtagatggaggtcaggttcaatctgtaataaagcggcagcagaacgtgggcgatgatgagatagcctatgaagaaaccgaaacaggtctgcatataggtcatgtcgatgccgcgtaccatacctgggacggaaacgaaggtaactcctgaaagggaggctccgatcattccgaaagaaacaatataccagggagaacggcggttgccgcgaaagaacgcgtcattatcggaatgacggccggtaaggcgggctacaagcagcagcattccgaaatagagcagtatggtcagcagaatataaattccgttcattttatttttttgagtgcaaatgtactcaaaatcgctgaaattgcgtaagtttgcacccattataatacaaaataactgatgaaccaacaatatccgtccatgctgctggaaaaagcggtaggagagtttgccaagttgccgggtgtgggacgcaagaccgccatgcggctggtattgcatctgctcagacaggatacagctgtggtagaggcgtttggtaatgcgatgattaccttgaaacatgaagtgaaatattgtaaagtgtgccataatatatcggacacggaaacttgccgtatctgttccaatccggcgcgggacgcttccacgatctgtgtggtggagagtatccgtgatgtgatggcggtggaagccacgcagcagtacagggggctgtaccatgtcctggggggagtcatctcgcccatggatggcataggcccttccgatctgcagatagaaagtctggtggaacgggtgaaaggcggtgaggtgaaggaagtgatccttgccttgagctcgacgatggagggggacacgacgaatttctatatctcgcgcaagctggacggcatggacgtgaagctgagtgtgatagcgcgtggtatctctatcggggatgagttggaatatacggatgaagtgacgttgggacgttccatcataaatcgtactttgtttacgggaacggcataaactgggaaaaacagaaagagatggaaaagaagataaaacaattgctgcgatacttgcagatagaatatgtggcggtatgggtgttgcctttgctcctggtggctctttatgaaacaggggtgatgaccgagggggcttacgcgggcgatgtccgtatggattatgtcttgcagacggtaggaattttattggcggtggggttgattcctttatcgctccggctgttcagcctttccttggtgaagaatgtgaaacagcgttcattgccggaagccttgagaagttatcgtcgctggagtgagataaggacagggatgctggtggttcccgtattggtgaacttgtcattttattatctgactctgaacaacacgggtgtattgtgtgccatgatggcgctgatctcttccctgttctgtgtccctacccgcaagcggatgctggatgagctggatttggtaaaagaggagaatgaggagcctgctttatgatgagtgaccggcattttcaagggaacgggataaggctccgtgcgccggagccggaagacttggaagtcatgttccgttttgagaatgctacggatgtgtgggaaatgagcaataccacaggcccgtattcgcgttttcagttgaagcagtacatagagcagacccagaatgatttgtttgccgaccgccagttacgcctgatgatagaaaacgggaaccggcaggtggtggggatggtggatgtatgttcatttgaccctttgcacaaccgggccgaggtggggattatggtggataaatcctgtcgcaggcaggggatagggcgtaatgccctggctttgctggaagaacactgtttccgttatctgggaattcatcagttgtttgcctatatcgctgtggaaaatcttccttcccgcaggctctttgcggcgtgcgggtacaaagagagtgcggtattgaaagagtgggcgcatacgtttggcggtggatatacagatgtgctggttgtccagaagctgaatctcagttgagggaggggtattggggatagcgggcccaaatggcgtatttccctcccatttcgttcaaactggtatgccataagtcgcggaagtgctggttgagcaacgtttctttcccggcttttcctatgagccatgagttttcttttatttctttggcaagttgtccatgatcccatcccgcgtaaccggcaaagaaacggatcactccttcaatgggcttcccgtccagtatatattgttgcacggcattgaaatcaccattcagataaagtccgtttcccagaggcagtgcgccttccagatcttttagcgtatgcaggaaaaaaattgtctcccggctcaccggcccgcctttatacaccgggacccgctgtgcgaattccaattcggggatgaggtcattgagcagaatgtggtaacggaaatctttattcatgataatacccatacttccctcgtcattatgctcgataagaagcacgactgctcttgtaaagtggtagtcgttcatgaaaggggaggatataaggatgcttccctgttgtggaagtactttatttgattctacttgaaaaacatgcatatccatagttgcgtttccttttatttacactactaatatacatattatatttaaaaaatacatgaagtgctctcttttttttgtatttttatttttcttgtatcttaaatggcttattatcagagttgatgtgaaaaagttcaagaaaatattcgtaaaatgcttgcggatatcgaaattttgcgtacctttgcaaccgcaatcgagagagatgcagtataagaaaaatgaaatttggtgcgttagttcagttggttagaatacatgcctgtcacgcatggggtcacgggttcgagtcccgtacgcaccgcttctcaagaaagcaaaattaggaaaagctctgattcttaacggaatcagggcttttttatttgtttgaagtgaagcgggatatagcgtttctgcgaagtatgtcagggttattgaacattcgtctgtatcagattcataaagaactggtatgtcgtgaagctttgataaatcgcaaaacgaaatgattatgttggttgatagcttgttttatgaataaaatcggttacaatatgtaaaatatcatataggtatttcccttgttctttttaaggatagaaaataggaattatggtcctttatagtagaaataagagagttatataaaaaatagcttgtgaaaaatatctgttttttttgttttgatgtaattctttattaattttgtagtctattacattaacgtagatatttgtagataacacacgcacatttttgaaatgaaaaacattagtttcgtattgatgtttattcctttaatctcttttgcgcagacatataaatatatagggatagaggatggactcagtaaccgtaggatatttgatatccagaaagattctaaagggtatatgtggtttttgactaatgagggcatggaccgctatgatggtaaggaaataaggcactataagttgctggatgaaagtaaaagtttgacctcctctatttatcttgggtggttatataaaggagatgaggggcgtttatgggtgattagcaagaaaggaggtgtcttttactatgatgaattatatgaccggttcaaggtagtgtataaattgtccgatgcctcagaaggggttacgtgtgggtatatggatcatagtgataatatatggttgtgcggcaaggactctattgtactttataatataaaggatactggtatccgtaaggtagctaacgtgatgcatggaaatgtacaaatggtagaacaagtagatagcagccattttttcattgcgactgaaaggggaatacgctttacggaattgaaaaataatgcattgagagttattccgatagaatctttgtgtgatatcagttcacaagtgaatgaattgtattttcattcggcatctcaaaaattatttgtcggaacctttgaggaaggtatttttgcttttgatatgaacactcgccagattgtccgttcctctattgatttgagtgatgtaaatattaccagaatctgtcctttgaatgagaaagaactgctgattgctacggaagggatgggaatacataaagtggatgtgaatacatgtgttacacatccttatattactgctgattatgaaagcaataatacaatgaacggaaacaatattaatgttgtttatattgatgaagaaaaacgtatttggctggctaattatccgacaggagttacgatagtggataatcggtataaaaattattattggataaaacattctattgggaaccagcagtcgttggtaaacgaccaggtacattctgtcattgaggatagtgatggagatttgtggtttggaaccagtaacggaatcagcctttataacagacaaactaaaaagtggcactcgtttttaagctctactgatcatcatttgaaggataaaaatcatattttcattactttatgtgaggtttctcctggaataatatgggcggggggatatacctccggtttgtataaaattaataaagagagtttgtctgtagaatatttctctccttttttgcttacttctataaatatgcagccggataaatatattcgtggtatgataaaggattcgcagggatatatatggtcgggaggattctataatttgaagtgctttgatctaaaggataatagtgtccgtttgtatccgggggtaagctcgataaccgctattgcggaaaaagatagtcgccacatgtggattggtacagttgcagggctttatctgctggatagagattccggcgattatcaatatatcgcaatgcctgtagagtctagctatatcaatacactgtatcagtcggctgatgggttgttatatataggaacgaatggttcgggagtactgacttatgatcatcgtaataaaaattttgtacattattatacaggtaattgtgcattggtttctaataatatatataccattttacctgaaatggatggatgtatcattatgagtacggaggatggaattactagttttcagataaaagataaaacttttcacaatcggaccagcgagcagggacttttgtcggcatgttttaatccgtcttccggtacattatgcaggaatggaggttttgttctggggagtacggatggtgctgttgaatttccggaaaaattgagattccctacttatgcttacaaaaaaatgatattaagcgattttcagatatcttatcagccggtttatcctggagatgaagattctccattggaaaaagatataaatgaaacgcaggtcttaaagctgaattatgatcagaatactttttctttggtattatcttctattaattatgattatccctctaatgtgttgttttcatggaaattggatggattttacaatgaatggagccagccgggaacttctaatctcatacgttatacaagtttggatcccggtaaatacacgttgcgcatccgggctgtttccaaagaggaacaacaattggtttttgaagaacgtgtactgacaattatgatagcccgtcctttgtggttgagtttttgggctatattagggtatgtgattcttgcgttatccctatttgttattatttatcgtgtcttgaatttaaagaagcaaaaaaaatatcagatgagaaaactcgcttttttatcaatacggctcatgatatccgtacaccgcttacattgataaaagcccctttggaggaattgtttgagaaagaaagttttagtgaccgtggaaagaaaaggatgaagattgccttaaggaatgtagatgtactgttgcggctgactactaatttgataaattttgaacggacggatgtttattcttctgagttgtttattgctcaatatgacttgaaatcttatttacaggatgtttgtgatactttccgttcttatgctgcttttaaacatttggattttacctgcgactgtaatgtggaggaaggactggaagtatggtttgataaagagaagatggattctattttgaaaaatctgatctcgaatgcgatgaaatatacacctgaatatggtatggttcgtgtttcggtgcaggagaataaggatacttggaaactggaagtgaaagatacaggtatcggaatatcatctaaagaacataataaattgttcaagatgcattttcgtggagtaaacgctattaattcgaaaatcacagggagtggcatcgggctcatgctgacacgaaaactgatacgtctgcacggtggtgaaatagaggtaaaaagtgtggaacatcagggtactactataaaggtaacttttttaaaggggcgggaacatttgcgtaaatgtattcagattgagcctgaacgggaaatgaagaaaggaaggatggatgagattgcggttgcagatcattctgggaaatcttctgaaattgttgataatggtgctttaccacgcattttagtagtggaagataatgatgaattgcggacttacctgatagattctctttcggatatatataatgtgcaggcttgttgtaatggaaaagaagcatgcatcattgtgaaggagttttggccggaacttatcttgtcggatattatgatgcccgaaatgggaggggatgaattgtgtgtgactataaaaggtgatatagaaacgtctcatattcccattttgttgttaacggcgttgggggacgaacggaatattctggaagggttgaaagtaggggcggacgattatattaccaaaccttttaatttgaaaatcctgagagcgagaattgctaatctgcttgcaaatagagcattgctgcgcgaaaaatatggctctttgaatatggccgcagaaatattggaagagccggtaggaaaaaattgtttaaatgcccttgattggaaatttatatcgggggtgcgtaaaaacgtggaggataatttggatgaccctgattttactgtagattcgctttgttcattgcaaaacatgagtcgctccagtttttataataaattgaaagcattgacaggacaggcgccggcagattatatccggctgatacgcttaaaccgtgcggcggaattgttgaaagagggtggaaagtccgtatcagaagtggcagaaatgactggcttttgtgatggtaaatatttccgtgaagtattcaagaaacattttaaagtgagtccaagtagatatggaaaagaagaacctctcagagtggatgctgaataggaatatgattatcagatagggaggagttgtaatatttggtcttttctttatcataattgttttttagacaataaaatgcctctgtcttttcgtttgtatggttaatagaattatatttgtacattatacaatatctattgaccatgaaaacttattcattattagcaggcattttattgtctttttcgttatctattcaggcgggtgatctgaaattgtggtataagcaacctgccggaacgtgggtggaagcgcttccggtcggcaattcccggatgggagcgatggtatatggcggaacggcccgtgaagaacttcaactaaacgatgaaaccatgtggggaggcagtccttaccggaatgacaggccggaagcattgaaaagtctgccccaagtgcgtgaactgatttttgccggaaaaaacatggaggctcaaaacttgattcaagataatttttatgccgggaaacatggtatgccctatcagacaatcggcagtttgattatagaaactcccggacatgaaaaggtaactgattattatcgtgatctggatttggaacgtgcggtggctactactcgctataaagtggatggcgtgacttttcaacgtgaagtttttgcatcatttcctgataaggtgatagtggtccgtttgacagcagaccggccggggaaactgaattttaaggtcggatatgtgtcgccattggaacataaagtcagcaggaaaggaaaaaaattggttctgactggaaagggtagggatcatgagggagtgaaaggattgattcgtatggaaacacagacgcaggctgatgtggatgggggtaaggtgaaaattgatgaccaaaacattacagtggaaggagcggacagtgttactctgtatgtttcatcgggtacgaattttattaattatcacgatataagtggcaatgagagtaaaaaagcgtctggatatctttctctggcattgggacgcccttatagtcaggttttacaggagcatatagctctttataaagagcagtttgaccgtgtaagattggatttgggaaccagtgagcgggctaagctggaaactgtcaaacgcatcgaactgttcaatgagggtaaggatgtttctttggcggtgttgctttttcagtatggacgttatttgcttatttcctcctcccagccgggaggtcagcctgccaatttgcaaggtatatggaataataaactggctgctccatgggatggaaaatataccatcaatattaatacggaaatgaattattggccggctgaagtgaccaatctgagtgaaacacaccagcccttgttcgaaatggtgaaagaattatcagttaccggcagggaaacggcacggactatgtatggatgcaacggatgggtggctcatcacaatacagatatatggcgtgccaccggtccggtggataaagcgttttatggtacatggcccatgggaggtgcttggttgactacccacttgtggcagcattatttatatagtggggacaagctgtttctttccgaagcctatccggcattaaaaggagctgctgatttttatcttgattatttaattgaacatcctgaatacggttggatggtgactgctccgtccatgtctccggaacatggaccttcgggagaggatactaaaaaagcttcaacgattgtagcaggttgtactatggataatcagataattttcgatgtgcttagcaatgcattgcatgcatcaagaattctgaaaatgtccgcttcttatcaagattctttgcggtctatgttaaatcgtctggccccgatgcagatcgggaaatacaatcagttacaagaatggctggaagatttagataatccgaatgacaagcatcgccatatttctcatgtatatggattgttccctagtaatcagatatctccttacactcatcctttacttttccaggcagctaaaaatacgttgttacagcgtggcgacgaagctaccggttggtccattggctggaaagttaatctgtgggcccgtttgctggacggtaatcatgcgttccggattattaataatatgttgaagctgctgcctggagatgaagtgaaagaggcttatccgcaaggacggacttatcctaatctgtttgatgctcatccgcctttccagattgacggcaactttggctatactgccggtgtggctgaaatgttgttgcagagccatgacggagctgtacatttgcttccggctcttccggatgcctgggccacaggaagtgtgcaaggactagttgcccgtggaggatttgtggtggatatgaactggaatggcgtgcagctggataaagcgaagattcattcccgtttgggaggtaatttacgtttacgttcgtatgttcctttgcgtggggttggattaaaagaggcaaaaggtaagaacccgaatgaatattatatgcaggcagagatcaaagagcctttgatttccaaggagataaacccgcaataccctgctttgtataaagtgtatgaatatgacttgatgacagaacagggacaagattatatagtggagcgtgggttataatacatgaagatgcccaaagtgatttttgtattatttcactttgggcacttttgtaaatggaagtgtcattgtgtagttatcagatggcttcctccttttccaattctaatgctctgggaaaaatgatattgttttccaggtggatatgttcatgtaatgcctcttcaaattgtttcaattgttgtaaaaccaagcggaagctggcacaagcatcttcaggggcggtgaatccattggttaatgaagagattttttcaaaacgttctccttcgtgattatgttcatcttccatcacttcgatgggatatagaatggtgccgcaatggaatttagctactttcaaaccttcctctttggcttggaacatttcataaacataaggaaataatacattctcttcttttgataaatgattctccaaatcaagaagcgagtcgcggaacagtgcttggacttgcaataactctggatgattctttgaatgcgcttcggttactttggctaataatgcttctatttgcggacctttggcacggattccccgatggtgtattttcaatacgtagtctattaataaatcgatgggccatccggcaaagtcaggagcattactaaccgtattctcttgtaattcatttaattcacgtgctactgcttcgggatcaataccgcggttccggcaggcttctgcaaacggagtattgccatggcagcaaaaatcaatatggtaacgggagaatactttggttgtatcaaagttgccggctacaatttgtccgactgtacatgaattgtaatttttctgtttcataattattccgtttattcgttcattaatcctaattttttcatatcactttctactgtaccgataccgcttactccaaagttctcgactagtactttcgtcacgttgggcgagaggaatgcgggtaaggtgggaccgagatgaatctcttttattcccaaactgagtaatgccagcaatacgattaccgctttctgttcataccaggcgatattgtaaacaatgggcagttcattgatgtcatgtaacccgaatacttccttcagtttgagggcgatgactgccaatgaatagctatcgttacattgtcctgcatctaaaacacgcggaatgccattaatgtcacctaaccctagtttgttataacgatatttagcacatcccgcagtcaaaatgactgtgtctttggggagcatctcggcaaaagtggtgtagtaatcacgactgcgcatacgcccgtcacaacctgccatgacgatgaacttacggatagctccgctctttaccgcttctactaccttgtctgctagttgaaatacctgattatgggcaaaaccacccatgatttctccatgttctatttctgtcggtgcggcacattgtttggctgtttctattatttcagtatagtccttatgtcctttctcatctgctgtaatatgcttgcaaccgggatatccggtagaattagtggtaaacatgcgttctttataagtggcattgggcagaggaggaacgatgcagttggttgtgaacaggataggaccattgaacgaggtaaactcctcccgttgtttccaccaggcatttccatagtttcctacaaaatgtgtatattttttaaatgccggatagtaatgtgcaggaagcatttcaccgtgagtatatacgtccacgccgctatccttggtttgttccaacaattcttccagatcatgcaggtcatgtccgcttatcagaataccgggtcgggtaccagttccgatatttacacgggtaatttctggattgccataactggaagtatttgctttgtcgagcaaagccattgttcgaacgcctatttcacctgttctcagtgctaatacagtcagttcatctgccgataaagattttgttgtaatttgtgcgatggtgttctgcatgaaacgatgaatactttcgtcattatgtcctaacctcatggcatgttccagataagcagccattccctttagaccatacataatcagttcttttaaagagcgtaggtcctcgtttttttcacgcaaaactccgactgttgcggcttttgcatcatattcatcgtgactgcctttccaatttaactcatcggcttccggcagaggaatatccttggcaaaagcttgatgtttaaggtcattacgtattactaatcctttgtcaatgcgtttcataatgctttcgtcgtcgaaattggcattggtaatggtacagaataaggcgtctacaataaaattgtccacatcttttttaacggggagggaatgttggcgcaattgatctgccacaacagaaattcctcgtactacaaaaagcaataaatccatagtacgtgctgtagttgcattttttccacaaacaccttttaaggtgcaaccgaaacctttggctgtttcctgacattggaaacaaaacatgttattctccatatcttttctcattttaatgatttctattacttttgtgcaaaagtacatggttttcgtcttttaagttgtaccatatgttacagcggatacaaataacagttaaaagaaagtaggatggaactgacaggattattgcagatagctccttttcagggaatgaaagaagaagaattggttgctttactattcggacttccgaatagtttgaaacactttgaaccgggtgatatcattgcccggcaaggtgacttatgtaaagggctgtacattcttgcatcgggaagggtacgggcgggaatgataaatgatgaagggaaagaactgacggtagaagaaattggagctcctaacttgctggcctcggcttttatttttgccactgaaaatcgttttcccgttaatgtagaagcaataggactttgtgaggtttttataataggtaaagaacgatttttagaatttatgcgtttgcatccattgatgatgcagaattttttgaaggatatttcggacaggagtgtctttttaagcaggaaattgaatgagtttgctttgttgaatttaaagactcgtttgttgaaatatctagaaacacattctgctattcataatcagcaggaggtggcgcagaagctgggagttactcgtccgtcattggctagggcgctgtctgaactggtgaatgaagggaaaataaagaaataatttgagatttctttttttaagtggaaaacgtgtcttgtatctttgagagtttttatgtgtaacccattcttgtgaaagtgttcaagttgtttttctataaaaactttgactttaaagaaagaaaaggatccttgtctataaggattggttcttttgaaatgaggactattttgaaattctcttgattaaaaaagagggtgaattcaagaccctttatgtgattcttttgtcttgattcaccctttgggaaatatttggttggtgtgtattcaacatgttacttcatctgaatacttttatctcgtacttttcttaatatttgttgtaattcgaatactttttcgggatgttcagtcgctaaattcactttttcccctgcttgtttcatatcatataactggggaatacctaaataaccagtttcaatttttggcccccaaggaatcattttaggaccatcgctgccttcaataaatttccaatctttagtacgcacggatagggtgtgattggatgcctgttcaataacccatgggcggtctgttttgtcttgtcctaataaatttgctaaccgattgtagctgtcgggagcacttcctttcggaatacgggcatctaccaaagaagccagtgatgccaaccagtctatttgtgaaataagcacatcgctgacttccggcttgttgatagctttaggccagtgtacaattacaggaacacgggtacccccttcaaatgcactgtattttccacctctcaggttaccggcaggttcgtgcccgttcagtagctcttctgccttgtcatcgtatccgtcgtctactaccggtccattgtcgctggaaagaataattaatgtgttctgggtcaatcccattttatcgagggcctcgagtaactgacctacactccagtcaaattgtgcgatagcatcaccgcgcagtcccatcttgtttttaccacggaagcgattgtgtggaaaacggggaacatgcacatcattagtggcgaaatacataaagaaaggctcgtctttatgttgtttgataaaatcaactgcatgtgcggtaatggaatcggctatattttcatctttccataatgctttgccacctcctttcatataaccgattcggctgatgccgttcacgatagacatatcatgaccgtggctcggcttcagattatataaaagttcaggattgtcttttccggtaggttcaccggggaaattttttatatagcttacttctatcggagctgaaggatcataattggctacttgaccattctcgataaatacacagggaacccggtcggctgtggctgccatgatataggaatagtcaaaccccaaatcacctagagaagcggagagaggggcattccagtcttgttgtgcagttttatcacctaatcctaaatgccatttgccaaatgctcctgtggcatatccggagcttttaaacatatctgccatagtatactgctcggggcgtataatcattcctgcattgcctgcagctacatctgttccgggtttacgccatgcatattctccggtcagcatggaatatctggatggggtactggtagcggcagtggcgtgtgcgttgataaatcgtatcccttcggatgccagacggttgacatttggagtttgtacgttttttgctccataacactccaagtcaccatatcctaaatcatcagcataaatgaagatgacattgggcttgtctgtgttttgatttttattttccgcatgaacagccaagcatgaagtaaatgccaatgagagcattccgtaatgtctttttttcatagtaattatattgtttagtgagtaatcaattctacaaagataaagatatattttaaaaacggggattaattctacaaaattgtggaatgaaattgtggtatttccacataatgtggaaaataaaaaaatgattattctgttgatttttagtgtattgaatggtactatgccccgtggtatattttttgttatgtgaattaacataatacgctaaaaactaaacttttaaatatataaccatttaccttaacaaaacaagggtgaaaagctgatagaaaagccatgttccccctgaatgggaaaatctgtatataactcagttttaagcttcccggttcgtgacgaatcgggaagtttctatttttttcttaatgaatctagtttttctacaagtcttttactgaaaataagttaatattaatggatgaaatgcagtatttgatctcttttttacttttaagagtagaaaatagattaatacattatggttatgaaaaagttgaaccttttattattagcattcctagtagttatgggagtcactttccaatcatgtgatgatggtgatggctactctcttggtgatgtggcagtggattgggctactgtaaatgtgaaaggtgcccatgtatatgactttaccggtgacagatggggacaaatttggcctgcaactactgattatttttggtattccccgatagatggacaacgagttattctttatttcaatcctctgtatgataattatccggaaggatatgattgttcagtcaaagtgttgaatataaaggaaattctaactaaacctatagaggagttaacagcagagaatgaagaaacgtttggcaatgatcctgtagatatatttgaaggtaatatgtggattagtggtggttatttaaatattatttttaatcagaatatgccttctaaaatgaaacatttggttagtttggtaaagaacactacaattacgcccgaccaggatggctatattcatttagaatatcgttacaatacgtatgctgatactactggttattggagaaacggtgcggtatcctttaatttgaattctttggaaataacatcggaaacaaagggtataaaggtaaaaataaactcggctaaaaatggtgagaaggaagtcacttttgatttaaaagaaacaccgtcaccagtaggtttgagccaaatggatttttctcaaatggaaatcaaataattagggtttgattagagagagttgtgtgtggccccttgcatcttgttgtggtagatgcagggggctgattgtattgttgataacgtttttcagtttgatatttgttgtttattggttggttgatggaaaaaattgtatggttacttcgttttttttcttatttcagtgttttttcagaattatcttgtttctttgtctttaagaaccaaaagttggacttatgaaaatactattagtagaagacgatgctaatttgcgtgaagtgactcagcgttcattggaaaaggagcgttatgtggtggaaattgctgccgattaccgtactgcattacaaaagatagaggattatgattatgactgtattttgctggatattatgttgccggatgggagtggcttggatttgttggaaaagttaaaaaaaatgcataaacgggaaaatgttatcattctttcagccaaagattctatagaagacaaagtgctaggattggatctcggagctgatgattatctgcctaaaccttttcatttggtggaactgaatgcacgtatcaaaagtgtgatacgccgtcatcagcaaggtggggaaaatagtatcaaatacggaaatatagaaatttttcccgataaatatggggtgaccgtagctggaaaaaagattgaactgaaccgtaaggaatatgatattctggtttattttatgaaccgtcccggcagattggttaataaaaacacacttgccgaatccgtatggggcgaccatatagatcaagtcgataattttgattttatctatgcccaaataaagaatttacgaaagaggttgaaagaggcaggagctactcctgaactgaaggctgtttatggttttggatataaaatggtagtggaataaatgaaattgatttattatgtcattatccgtatatcgttagtgttgtcggttttattgactggctgggccatccttttctattttactgtaatggatgaggtgaatgatgaagtggatgactcattggaagattattctgaaattatcatcatacgtgcattggcgggagaggagcttccttctaaaaatacagcttccaacaatcagtatttcctgcgtgaagtgacaaaggaatatgcaggatctcgtgatgatatcctttataaggattctatggtttatattcccgaaaaagatgaaactgaacctgcacgaatccttactaccatttttaaggatgatggcgaaaagttttttgaattgacggtagcgaccccttctatagaaaaagatgatttgaaagatgctatggcaggttggatgatttttctttatatagctttattactgactataattgttattaatgtgtgggtgttttatcgaaatatgcgtcctctttatgtattgcttcattggttggataaatatcgtatcggtaaaggaaacgagcctttacaaaataatacccgggtttcagaattcagaaaattgaatgaggcggctgttcgttatgcagagcgcagtgagcagatgttcgaacagcaaaaacaatttattggtaatgcatctcatgagatgcagacaccactagctatttgtcgtaatcggttggagatgctgatggaggatgaaaatctttcagaaagccaattggaggagttgatgaaaacccatcagactttggagcatataacgaagctgaacaagtctttgttattgctttcgaagatagagaacggtcaatttacggatactacccaagtagaagtgaataaattattgaggcaatatttggaggactataaagaagtgtatcaatatcgtgagatcataacaagtgtagaggaagaaggtattttctatcttacgataaatgagacactggcagtggtgttgcttaccaatttgttgaagaatgcttttgtacacaatatagacggtggacacatccggattgtcattactccccacagtgtgatgttttgcaatacaggggcggcacaaccactggatgcccagcgtatttttgagcgtttttatcaaggaaagaaaaaagaaggctcaaccggtctaggcttggcaatagcagatacgatatgtaaaatgcaggctctcaggctttgctatgaatataagagtggggagcattgttttatactttatacatccactcataatcaatgaaaaaaaatcgtgtttttttcagaatttcaaattcttttcagaatctcccttcatatttgcatcagaaaacagaatgtagaaccaaataaaaaaaatgacgattatgaaaaaggtattattattgttagtgtgcttatttacgttgcaaacagtggtatgggcggatgatgacaaacctattcaagtaaaccaattgcctcagactgcacaaacttttatcaaaactcatttccccaataacaaggtggcgatggctaaaatggaaacagactggtttgataaaagctatgatgtgatttttaccaatggagacaaattggaattcgataagaaaggggtttggacagaagtgaattgcaaatacagcgctgtacctgtcgctgtggttcctgacgcgataaagaagtacgtcactacgaattatcccgatgccaagatgctcaagatcgagagggacaagtatgattatgaagtgaaactttctaatggttgggagataaagtttgatatgcagttcaatgtgattgatattgacaattaattattagttatagatctgaagtgtggtttatgtgaataaactgaagctttgcaggccgtttcttgttccatgaagaaacggcctgtcttttttattgattttaatagcatagtaattctgccgacacgatcttgtaatagataacatggatatttgcatagttttaataataaagatatgcatctaagaacgtattatcctacagtggttttatcggatatccatctgggaacctctcattccaaaacaattgaagtcagtaactttctgaaatctgtcaattgtgaccgtctgatattgaacggagacattatagatggttggcatttgcgtaaggcaggtactaagaggtggcaagcaaaacatactgatttctttaaggttatcatgaagatgatggagaacttcggtactgaagtaatttatgtgtgtggcaaccacgatgattttctggacagcttggtccctatgacattctataacgtaaaaatcgtcaaagaatacatccttgaaacacatggaaagcgttattatgtgacacatggcgatatattcgaccgggttactacgcagatgaaatggttagcccggttgggcgatgcaggttatacattcctcttatgggtgaaccgcttttataaccaatatcgtactaagcgggggaaaccgtattattctctgtcacaggccgtcaaacaaaaagtaaagtcggctgtttcctatatatcggactttgagaaagtattggtggagtttgcacgtgtacgtaaatgtgacggagtgatttgtggtcatatccatcatccggctaatacctattatgatggtattcattatctgaattcgggcgattgggtagaaagcctttcggcactgactgaggatgcggacgggaattggaatatcatggaataccatcatgtactagctgatgagaatgaagaaaataaagagtttaccctaatacatacagcctcatgaaatttttatttatagtacagggtgaggggagaggacatcttactcaagccattacgttggaggaaatattgcgccggaacggtcacgaagtagtggaagtactggtaggtaaaagtagttcgcgccgcttgccgggatttttcaatcgtaatatccatgctccggtaaaacgttttgtcagtcctaattttctgcctacaccagctaacaaacgggtgagtttgatgcggagcgtggcgtataatctagtgaaacttcctgtgtatatcaatagcattaactacattcgtcagcgtatcgaggacagtggtgcggatagggttatcaatttctatgaattgctgaccggactgacttatttcctgttccgtccctctgttccgcaaatctgtatagggcatcaatatctgttcttgcataaaagttttgaatttccaaaggctgataaagtaagcttggctcttttgaagttttttaccgtattgaccagcttgggggcgaaggaacgtttggctctttcttttcgtcacatgaacgatgatcctcagaatcatatccgtgtgattcctcccttgttgcgtagggaagtgactttacatgaaccttattccggtgactatatacatggctatatggttaatgcgggtttcagtgaaaatgtaatgaaatggcacaggcaacatcccgggataccgcttcgtttcttttgggacaagtgggaggaggaaccggtgaagagagtggacaatacattgagcttttatcaactggatgatgtggaatttttgaggcagatggcgggatgtaaggcttatgccagtactgccggatttgaatcggtgtgcgaggccatgtatttaggcaaacctattctgatggttcctgctcatatagaacaggactgtaatgcatatgatgccgaaaaaagcggtgcgggtatcatttcctcagattttaatttgcaacagttgctggaatttgcgaaagattaccaccccaatcgtgattttgtgtattgggtacgtggagctgaatatactttgttgaatttgttagagagtgattcttccaattatcaacaaattttatttaatgagatgtatttggttgaagagtttatttgattttcttataaaaactctctttaagtcatggctgtatgcgtcggctgtgacttttttattgttattgatttgtagttatattgacatgttattgtaatgtgtatgacgtatttttgctaaaaatattaaaaccgtatggagaagaagaaaaaggaagataaatattatctgccgagagatatcagttggatgtattttaatcgtcgcattttgcaggaagccatgaaagaacgtgttcctatactggaacggttgagctttttaggaatttactctaataatttggatgaatttttcagagtacgtgtagctactcaaagccgggtggccgagtgcgaagataaagcggcgcattctgaacgggaagaagcattgaaactgattagacagataaataaactgaacaacaggtactctaaagaatatgaaggtgcgatcaagcaggtaacggcagaattggagaaagaaaatatttgtttagtcaatcatgtacaactggatgaggaacaacagttatttgtcgattctttttatcaacaacggctgaatgggtttattagtcctgtctggctgaaatcagtaaaacaactgggtaacgaagcggatgaaaatatctttttggctgtaaagatgaggaaagaaggacataaagttggagaatatgcaattatagagctgcctgtagcacaggcagggcgttttatccgtctgccggataaggatggtaaaaattacctgatgtatttggatgatgtggtacgctattgtttaccattgatatttcatggtatgaactataaacattttgaagcgtatgctttcaagtttaccaaagatgcggagatggagatagacaatgatctgcgtaacggaatgatgcagaaaatttctaaaggagtaaagagtcgcaaacgaggtgagcctttacgggttatttatgatgccagtatgcctaaagatcttttaaaacgtgtcatgaacaagttgaatctggataagttggatacagtattgggcggtggaaaatatcataaccataaggacctgatgcgttttccagactgtggccggaaagatttgaaataccctgaatggactcctgttttgaaaaatgagctttcgggtaacgttggtatgttggagctgattcgtaggaaagatcgttttattcatgtgccttatcatagtttcgattcttatatccgtatattgcaggaagcggcgattaataaagaagtaaaaagtatcaagacaaccctctatcgtttggctaaagattcgaaagtggtaaaagcattgattaatgcggcacgcaatggaaagaaagtaacagtagttattgaattgctggcacgttttgacgaggcttccaatatagattggtcaaagaaaatgcaggatgccggtatccgtgtgatatttggggtggagggactgaaggtacactctaagattacctatatatccatgaaaacaggtgcggatatagcttgtatcagtacaggaaactttcatgaaggtaacgcccgtatgtacactgattatatgttgatgacggctgctaagaatgtgacgcgtgacgtgagtttggtctttgattttatagaacgcccttattctcccgttcgcttcaaagaactgttggtatctcctaatgagatgaagcaaaaatttatccgtcttattaatgaagaaattaagaacaagcaggccggaaaacctgcttacattttgataaagattaatcatattactgatccggtaatggtgaagaaactgtatgaagcatcttcgcatggtgttcggatagacttgctggttcgtggtaattgttcactgattacgggagtgccgggagtgagtgatacaattcgtatcaatggcatcatagaccgttatctggaacattcgcgtatttttatttttgccaatggtggtgatgagaaaatgttcattggttcggctgactggatgccgcgcaatttggataacagggtggaagtgattgctcccgtttacgatccggaaataaaggcagacttgaagcgggtagtggaatatggtttgaaagatactctgcaaggacgggtggtggacggaacaggagagaatcgtccttggatatcggaagataagacagctttccgttcgcaggaggaattatacaaatattatttaaatgaaaacagaataaaggattaagatgggaaaagtgaattatgctgctattgatattggttctaacgctgtgcgccttttgataaaaagcattgacagggaggctgtgcaggagaaaaaaattaaaaaagtgatgatgcttcgcgtacccctacgactagggttcgatgttttctccataggtgaattgtccgagaagaaagcggataagctgagacgtttgatgaaggctttccgtcagttgatgaaaatttatgatgtggatgattacagggcatgtgctacttcggctatgcgggacgcgcgtaacgggaggacgataatcaagaaaatcgaaaaggatacaggtatccgcattgagataattgatggtcaggaagaggctcgaatgatttataataatcatatagagtgtatggaagaccgtctgggtaattatatgtatgtggatgtgggtggtggcagtacagagattaatctgttgactaacggtgagttggtatggtcggtgtcttacaacatcggtacggtgcgtatgctgagtaatgctgttaaagaaggaacttggcagcaaatggaagaagagcttatgaaagtgacggaaggtgttgccgcgatcaatatcatcggatcgggtgggaatattaataagttgttccgcctggcagataagaaggataagaagttgcaacgtttgccggtcagttcgttgcaaacagtctatgatgtgttgaaaccgctgactccggaggaaagggtagaggcattcagtctaaagcaagaccgtgccgatgtaattgtgcctgctgcggaaatttttctgaaaattgcagaagtagtgcatgcagaatatatttatgttccggtcattggactgtctgatggtatcattgacaatctgtatgccaaaagccttgagaaagaaatgaaagctgaataagctttcattttaatactgtttgtgttgtacggcttcaaaaatattcgcttttctctgataaattgttggaaattaatagttgaagttccaaaatttgctatatatttgtaatcgttaacaactaacaaacagaaataccatgatgaacaaaatgtgcatggcagctataatagctgcttctttgtatgcagggactacttttgcccaacctgccgccgtaaagaaaatcattgaaacgggccaaactgataaccgggtaatgcatcagttggatattctcaccaatcgttttgggggaagagttattggctcggatgcatatgagaatgcagccgagtggatgatgcgtgaatataaacggtggggtattgacgtacgcttggaagaagctggggaactgccggtaggttttaaccgtggtccatggttcggacgtttaatcgggggagatcaggcgatggatttgcattttgtcactccatcctacacttcaggtactaaaggtctgcaacgcgggcatgttttgatagagccccgtactcaagaagaactagaccgcatgaaacatcagttgaaaggcgcttgggtgttgatttcaggtgaaaatgtaggttggcctgttgaccgttctgctaaaggagattcgttgagagctgctatcaaagctgaaaatatagaaatagaaaagcagaatgctgccttgatggaagagaattggagcaaaggaaccaaacatgccatgaagcctttgcgtgaaatgccgggactattttataaagaaatgtgtgaggcaggagcacttggctttattcagtcggcacctgtacctttacgtgctttgtatgatcgtgctttattaaatgatccccatactacgtttgataatttgcccgaagtctgtgacatcaaattggatgaacatcaatacaaaatcatcaagcagatggtgaaagaacgccggaacttctggctggaatttgatattcgtaatcatttcaaactaggtcctgtgaaatatcataatgtcgtagcatccattaaaggtactaaatatccggatgaatatgttattataagcggacatcttgattcttatgatgtggcaaccggtggtatagactgcggtacaggtattggtcctatgatggaggctgcccgtatgattgcactttccggtgcaaaacctaaacgtactatattgtttgtggcttttgctggagaggaatttggtttgttgggcgcaaaatcttatgtcaagactcacgctaaagagttaggaaagattgctaatctattcaatcgggacggaggaccgactcctccggtgggaatctccgttcctcaggctatgtatgatgattttgtggaagtgtgcaagcctgtgaaagaaatccgtgcggattatccgtttgaagtaaaggtagcgaaaccttttaaacgtcctactcaaagcggtggtacggatgccagtgtttttgcagtggaaggagtgcctacttttggtttcaatacacaagacataaaaggatataatttctcttatggggaaatatggcatacggaacgtgatctttatacgaagaatataccagaataccaagagcatgcagctacggtaacagcggtggtcgccttgggaattgctaatttaagtaaacagttatctcgtgaaggaatgcacaaaaagtagcgcaaatgttctttttttcttcttttagtggaattatgtcgttttgatgtgtaaaaaatgttagcttaagttcaatctactgagataatctttacctttgctgcgcatataaagcaaaatgtaggtaaacaaaaaacctgcgatatttgttaatatagaaaaggtaaattatcaaataaaagtaaatagaagcttatgtcacagattattggacatatttcacaagttatcggaccggtagtcgatgtgtattttgagggcaaaggcatcgacaccgatctgcttcttccaagcattcatgatgcattgactatcaaacgcaatgacggcagaattttagtcgtggaagttcaacaacacattggtgaagacacagtgcgtactgtagctatggatagtacggacggtttgcaacgtggtatggaagtaattccgacaggacatcctattactatgccggttggtaatcagattaaaggccggttgatgaacgtagtaggtgaggctgtggacggtatgcgcccgctgagtaaggaaggggcgtttcccattcaccgtgaaccccctaagtttgatgagctgtctactgtgcaggaagtactcttcacaggtattaaggttattgatttgctggaaccttattcaaagggtggtaaaatcggattgtttgggggagccggtgtaggcaagaccgtgcttattatggagctgattaataacattgccaagaaacataacggcttttccgtttttgccggagtcggtgaacgtacacgtgaaggtaacgacctgttgcgtgaaatgattgaatctggtgtaatccgctacggagaagaatttaagaaaagtatggaagaaggccattgggacctttccaaagtagactataatgaagttgaaaagtcacaggctacattggtgtacggacagatgaacgagcctcccggcgcacgttcttccattgctctttcggggttgaccgttgccgaatctttccgtgaccgcaaaaacggtgacagcaacggaccacgtgatattttgttctttatcgacaatatattccgtttcactcaggcaggttccgaggtttcggctttattgggtcgtatgccgtcagccgtggggtaccaaccaacactggcaacagaaatgggacagatgcaggaacgtatcacttctaccaagaatggttctatcacctcggtacaggctgtgtatgtacctgctgatgacttgacagaccctgcgcctgctactacatttactcacttggatgcaacaaccgtattgagccgtaaaattaccgaactgggtatttatccggctgtagatccgttggaatcaacctcacgtattcttgacccgctgattgtagggcaggagcactatgatgtggctcagcgtgtaaagcagattttgcagcgtaacaaggagttgcaagatatcatttctattctgggtatggacgaattgagcgatgaagatcgtcagactgtaaaccgtgcgcgtcgggtgcagcgtttcctgtcacaaccttttgctgtggccgaacagtttacaggtgttccaggtgtcatggtttctattgaagataccattaagggattcaagatgattctggacggtgaggtggattacctgcccgagcaggcatttctgaatgtgggaacgatagaggaagcaatagaaaaaggaaagaagttgctggatgctgccagccataagaaataaaagtaagtatggaacatcatgaagatcttcatttgatagtggtttctccggaaagtacattgtttgacggtaaagtggacattgtgatattaccgggagaatcaggctctttctctgtcctgcatgaccatgctccgttgatatcgtcattgataaagggggagataaaatatacagaggatggattagagaaatcaattggaatatcgagtgggttcgttgaggtaagggacaatatagtttcggcctgtgtggaaatctaatacataattatgtctttgttagccgtaaagagaaaatttatcatatcgttgaccatattaatggttgtgttgagttggggaggagccttggtatttcacaccttgttgcctaggtattattttgcctggtatccctccataccgatatttttttatcttttcggccttttttacatatttatgttcgggtactgttatcgggtaagtccgcaaaaaatggtggcggtttacttggtggcgaaagtgacgaagatgatgttgagcatcttgattatgtccgtctatgcagtggcggtggcacatcaagttctgtcatttataggaacttacatggtattctatattatctttctgatttttgaaacccgcttcttttttcattttgagataaaacataaaagtaataggtacaagtataagtaatatgagaagtttacgatatataggaacggttttaatgttgctgatcgcttttctgcaaggagccaatgcccgggaagagtcggatactgactataaagagcagcaggtagacgtaaatgaaatcgttttcggacatataggtgattcgtatgaatggcatatcactgacataggagatacacctatagctataccactgccggtaatcgtaaaaagcagtacaggatggcacgcttttctttcttctaagtttgaggaaggaaacggagagtatgaaggactgtacattgctaaagacggtgaatataaaggtaagatagtggaaaaggatgctagcggtaacgaagtaaaacctttggatatctctattacaaagaatgttaccgggttgtttgtcaatagtgccattctggtgattctagtgttgagttgtgcccgttggtacaaaaaacatccagtagaaaaggaagctcctaaaggaatggtgggcatgatggaagcttgtatcctggcaatcaatgatgatgtgataaagggttgtatcggtaaggattataagcgttatgcaccttatctgctgacggctttcttctttatcctgatcaataatctgatgggattgattcctttcttccccggcggtgcgaatattacaggtaatattgccgttacctttgtgctggctatctgtacgttcctggctgtgaatctatgggggaacaaggaatattggaaagagattctatggcctgatgttccttggtggttaaaggctccgttcccgatgatgccgattattgagattttcggaatctttacgaagccatttgcattgatgattcgtttgtttgccaatatgatggccggtcatgctgctattctcagtttgatatccatcatttttattacggcgaatatgggacctctgattaatggttccatgggatttgttgcggtggcattcggaatctttatgactgcgctggaattattggtcgcatttattcaagcatacgtatttaccatgttgtccgcggtctttatcgggttgtcccgtacagaagagatgcgtgaagaaaaagaaataaaataaattaaataattaattcaaaaaacaaactattatgttactagcagttttattacagtccgctgctgcggcaggtttagggaaattaggtgctgcacttggagcagctattgcagtaatcggtgcaggtatcggtatcggtaaaatcggtggttctgccatggaggcaattgcccgtcagccggaggcggcaggagatatccgtatgaatatgattattatcgccgcgctggtagaaggtgtggcgctgatcgccattattgtttgtttattaactttgttcttataattaatgtagcatgtcattattaacacctgatagcggtctgttattctggatggtcatcgttttcggtatcgtttttgtcattcttgcaaaatacggttttccggtgatcaccagaatggtggatgagcgaaaacaatatatagacaagtcactgcttgctgcacgtgaagccaatgagcaattggctaatattaaagcagacagtgaaatgatattggctaaggctcacgaggagcaggcgcgcatcctgaatgaagcggtcgcaacccgcgaacgtattctgaaggaagccaaaacacaggctcaggttgaaggacagaaactgctggatgaagcgaaaaagcagattcaggcagaaaaagacagcgctatcagcgacattcgccgccaagtagctgtgctgtctgtcgacattgctgagaaggttttgcgcaagaacctcgatgatgagaaagaacaaatggaaatgattgaccgtttgctggatgaattaactgtttctaaagactgattgttatgtatataggagtcatttcaatgcgttatgctaaggctttgctggcctatgccgacgaaaaggggacagaggatactgtttatgaggaagccggaatattggcagatagtttctcgagaatccccgaacttcgacaggcattggataatcctgtattgcctgctgaaacaaagttgaaactgatttgcgaagctgccggaggaggtaaggtgagcgaagaattgaaacgctttgtggaattggtactggaggaacgaagagagaaattcttgcagtttatgattatgtcatacattgacctttatcggaaacagaagaatatcagcgtcggtaaaatcacgactgtttgtccggtggcggaagaggtagtcaaccgcatacgggcattggtcgtagagaaaactcatggaactgtagagttcaaaaccaaaatagatccgaaactggaaggtggttttatctttgaaatcggaacttacagattggatgcgagcgtagctaaccagataaaacgggtaaagcaacagtttatagctaaaaatagaagaatagtataaaattaaaaattataagttagaaaataaaagtaatatcagtttgtttcttttagtttttaacttaaggttaatacctggtcgggctttaatttttaattttcaatttttaatgtaaaaagattatgtctgaaaatataaaacccagcgaagtatccgaagttttacttcagcaactgaaaggcatcaacacccacctgcaatttgatgaggtagggaatgtgctgcaggtgagcgatggtgtggcacgtatttacggtctgcgcaacgcggaagctaatgagttgctggagtttgaaaacggtatcatggctatcgtgatgaatctggaggaggacaatgtaggtgcggtattgctaggtcctactgatcagattaaggaaggaatggtggtgaaacgtaccaaacgcattgcttctattaatgtgggcgaaggtatgttagggcgtgttatcgatccgttaggcgtaccattggatggccgtggacaaattggcggggaactgtgcgaaatgcctttggaacgtaaagctcccggagtgatcttccgtcagcctgtgaaccagcctttgcagacagggctgaagtctgtggatgctatgattcctatcgggcgtggacaacgtgagttgattatcggggaccgtcagaccggaaaaacctctatcgctatagatacgattttgaatcagaaatccaactatgaagcgggaaaacctgtatattgtatttatgtagccattggtcagaagggttccactgtagcaagtctggtgaatacgctgcgtgaacgcggtgcgatggattataccatagtggtagctgccactgctgccgatccggctgcattgcagtattttgctccgtttgccggagcggctatcggagagtatttccgtgacacaggccgggatgccttggttgtgtatgatgacttgtcaaagcaagccgtagcctatcgtgaagtatccttgattctgcgtcgtccctccggtcgtgaggcatatccgggtgatatcttctatctgcattcacgattgttggagcgtgcggcaaagattatcaaccagcaggaagtggccgaacaaatgaatgaccttccacccagcttgaaaggcaaggtaaaggcaggtggttcactgaccgcattgcctattattgaaacacaggcaggtgatgtttccgcgtatattccaaccaatgtcatttccattacagacggtcaaatattccttgaaaccgatttgttcaaccagggtttccgtccggctatcaatgtgggtatttccgtatcccgtgtgggaggtagtgcccagatcaagagcatgaagaaggtggcaggtacattgaagatagatcaggcacaatatcgcgaactggaggctttctccaagttcagcagtgatatggatcctgtaacggcaatggctatcgaccggggacgtaagaacaaccagttgctgatacagccgcagtacagtccgatgcctgtcggagaacaaatagccattctttattgtggtacacatagtttgctgcgtgatgtacccttgcataaggtgcaggatttccagaaatcattcctagaaatgatgcgtgccgaccatcagaaagatgtacttgatgtattgtcaagcggtgtgataaatgatgatgtaactgcaattatagagaaagtagcagctgatacggctcaaccatttaaagtgaacgaatagtcatggcatcactgaaagaagtaaaaggaagaatagcctcagtaaataatacgcggaaaattacttcggctatgaagatggtagcctctgccaagttgcataaggcgcaggctgccatagaaaacatgcttccttacgaacgaaggctgaatcacatcctgaccaattttctgagtgcgggtagtgaggtggagtctcctttcattgtgaaacgtgaagtgaagcgtgtggctatcgtcgtgtttgcctccaataccagtctgtgtggcgggttcaatgcaaatatcatcaggcatctgacggttattctggatgaatacaagtccctgggtatggagaatgtgcttttgtatccggtaggcagaaaggtagcggaaggtgtgaagaaattgggattcaaggctgaaggcgatttccagcatatggcggataaaccttcttatcaggaagcttccgccttggcagaggacttgatgaggcgctttctgcatcgtgacatagacaaggtggagttgctgtacaaccattttcgttctacagcagtacaggtcctgacgcgtgaaacttatcttccgatagacttgacacaagagaagaaagagaaggacaaaggcaggatacccgattatattgtggaaccgtctgtagatgtggtgatggaggaattgctcccgaagatgttctgtatgaagatgttcacggtattactggattcgaatgcttccgaacatgccgcccgcaccatggctatgcagattgctacagacaatgcgaatgatttgttgcaggatctgacggtgatgtacaacaagagtcgtcagcaggctattaccaatgaactgttggatatagtaggcggttcaatggcctaatttttttcttggggcaagatacgcagcatcttgccccaagaatttgaaaatcatgcgacaagtttatcggaatctttctataagtgtcatcccttccatcgaaggcgggttaaataatcatagtgctccccctctttaataagctccgcctcgaatccattcccggcagcatacaggctgagtgtctgaaaatcgacataaagccagtcgaaagaatctccttttatatttttgtattgcatccggaaatctatttcaccataataatctcctgccagatcaatcaggaaactcccgtcctcatcttcaaaaagataacggagatcactggaatccatcaagatacatcccccggggcgaagcagttgtttcatcttttgaaagaaagctgccatattttccaacttcccgataatgcccgatccgttcatcagcatgatgattgtatcgaatgtttctagaaaatgtgtatcgaaaagatttatctgacggacattctttatccctcttttttccatcacctctactgaaagcggggaaatatcgatagcgcatacctcttttcccatctcttgcaaggccagtgcatggcagccgcttccggctcctacgtccagaatatttccttcggctatttgtaaggcaatctgttccagttccggcatttcgtcataagggcggaataattgattcatgggtatttcgtcttcctcgaactgtgaggaaaatacacgtaacttatctgctttgcggtggttgaaataatcggcgatggcagctcccatcgggtctttatcgggtgaaagcaagtttgttttcatttggaatcattgtttgttgttgaagttgcaaaggtaggcaatttagtggagaaaatactaaatgtttgtgtaagatataaaccttgtcactgtaacttatccaatctatcatgaaaaaaacagtaattcagcaaaagaaaaaatacattctaataagaaatacatccttttttcagatctttgcataagaaacaaggagtgattggtggttaatacgccactagttgatcatcattagtcgataatttttatgaatacattgaaatctcgtatagcatctctgttacaacaattgaatgaaagggtttttgagaaagaacatattgtcgctcttgctctgctttcggctgtggcaggagaaagtattttccttttaggccctccgggagtagcaaaaagtatggtaggacgccggctgaaactggcattccgcaacgcttccgcatttgaatatctgatgtcacgattcagtacgccggacgaaatattcggccctgtctccatttccaaactgaaagacgaagatacgtatgagcgtattgtcgatggctatctgccttctgccaccattgctttcctggacgagatatggaaagctggaccggccattcagaatgcattgctcaccattatcaatgaaaaaatataccgtaacggacagttctccattcatgttccactgaaggggctgattgccgcttccaatgaactgcccgcccaaggacaaggactggaggccttgtgggatcgtttcctgattcgctgtctggtgggaggcattgaggatatgggagaatttgaccggatgatttcctctacggatgaaacggaaccggtggtggacgagcaactgcagatcaccgatgaggaatacatccggtgggaaaaggagatggctgccattaaaatccattactctattttcgaagtgattcatgccttgaaggaccggatagagcaatataacctccagatacaaaatgaggggggtgtgtcgtctcctctgtatgtgtcggaccgtcggtggaagaaaatggtgaagctgctgaaagcttccgctttcctgaatggatcggacactatccgcctttcggattgtacattgctgtcctattgcctttggagtgagatggatcagatggaggcggcagaggagatggtgaacgctgccattcagaaaagtgccgaaggctatctgctgaatataaaagggctggaacaggacattgaagaactgaaagaccgacaatcgtccgaacacagtttgcgtgaagtgaacgatccgggcatacaggtcattgatacttactattaccaggtagagggcgtccggatgaaagagcgcctccttatttttgcagccgactatcaacatctggatcagaccggtaaattattttatttgcataaggataaatataaggccaactgctgtattctgaagaaatatgattccatactccatgccaaagttccgcgtaataagatatatacgctgaaaaaagggcttcgttccatttatatcaataattatgaatatcacttgatgtgctatgaggattgtcctccaccgccacccgaacccgagcaggaggatttcggaaccaaatataaatcggtggccgaagcgttggacagagtggagaaggattggtccgggctgctggatgcggaaacggaatattatgagaagcatttatttctcagcgaaaagcagcgggcttccatgcggaggatgcttcgccaccagaagaataccatagaccgatataagaatgatttgaacgaaatggcagatgcgtaccgaaaagagaaccaggaatataaggttgagagatctgaagataatctattctcaggaactgaaagataggacattcaaagcatacgaggaggatgtaagcaacggggtggtgcgtcaacgcgaactggaagagaaagtgttgatgtactatcggcgtaccacaccttctttgcaggaatattattcccgctacactccggagtgggaggctttctactcttcggaacatctgccggatatggcatttttgcaatatttgaagcagatgcgcggtgctttcaaaaagaggtatgaactggcggaactgaatattgactattatatcagcctgttggagaatgcttctttatggaaaggagagggaacccggaccaaggagttttttttggataaatggcatcagttgcttacccgcaaagagtatgactatcagtacatgcatataaacagtttatgtgaaggttttgatttgttgatccggaaacaaggaaaggaatcgggtaacaaactgttgggctcgcgcatggagtggctgcttcataattatcctgatttgtaccggaggatacttccgtatgaaacagtgatgaagcgcaatccggctatccaacaattggcgcgtttgctgggcaagaagcatcgggaccaacaaaaatacgattctttgtcgggggtagataaaaagaggctgatcagacactctccgcatagtgatatcacaggggtgactttgggaaatgacctgaatagtttgttgcccatcgagtattgttatctggctgatgatgcgctgcgtgccgtatttatggaacgatatgccgaaaagagattgcaactgttcgattaccagtccaaggtaacggaacaggtaaaggatgacaagcataaggtttcgggacaaggaccttatatcatctgtgtagatacttccggctccatgcagggagacagagagatcttgtccaaatcggctattctggctatagcgcaactgacggagaaaacccatcggaaatgttatgtcatcaatttctcggatgaggctgtgtcgttattgattgaagatttggggcgggatatgcccaagttggcggagtttctgaataaacgttttgacggtggaacggatatagagccggctcttcgggaagctgcgcatatcatcaacggaaatgacttccgtgaatcggatatcgtattgatctcagatttcgagatgccgcctttatcccgtgatttaatggaacaggtaaaagtgattaagcggaggaagacttctttcttcggattggtgtttggcaacaagcctgaaatggaatatttgaatctttgtgaacgttattgggaaatgtaagttacattcctgttacataaatatgaaatgaatattgctgcttgtgtggacctaataacttcataatcaaattaatggttattcatttttagtataggtcattccttttatttttgctataaagtaaaaatagaagaagaaaatgaaaagaatgacttatgttaaagcattgatgtgcctgttattcccctctgctgctttagttacccgtgcgcaacacccggttgccggggatttgaaatgtaaactgaccggacgtatgcttatggatggtggcgtttatttaaagaatgacaacctgtttggtaacggtacggagtttaatgacttgcggttgggggtgaaagcgacctatcagaactggagtatgaagatggaggtaggttatgtagggaataaagtttccataaaggatgcctttgctgcttatacttcgggcaagcatattattcaggtgggacaattctatgaaccttttacattggacatgttatgtagtacgtacgaccttcgttttcatcagtcaccgggaatcgtgctggctttgaccaatagcaggaggatgggaacctcctatacctacaatggaaaacattattatgcttccggcggtttctttacagacagtgacctgggtaatgtgaaaaatgtttcacaagggtatgccatagacggtcgtttggtatatcgccctgtaaacgaagagggaaaattgttacacataggtgcagcggtggtgtatcgtactccggatagcgcgttgccgggagatgaagacgagaatacgtttatttataaatctccgggggtgagcactattgataaccggaatcttatttacgccaaggtagatcatgcaaagtaccagttgaaacaagggttggaattaatgatcgctcatcagaggttctttttgcaaggggagtatatacgaactatggtgaagcgtgaacagaatttcacaaattatacaggacatggcggatatgtgcaatgctcctggttgttgacaggcaggcaatatgggtatgatgaagcattggcttgtccgggcagacctgtggggcgggcattggagctgtgtggaaggtttaatatgcttgatatgaataatgaggaagccggtgtatggggaggggctcaaaaggatttttcattgggcatgaattattacatgaataagcatatagggatgaagctggcttatagctgggtgatgccgggaaagcatataaaggagattagtgataagaatttcagtgtcttgcagctccggttccaaatgatcttgtaatggaagaagggtaaaaacaaattcgggcgcaatcattgcgcccgagtcataaagctatatttattttttattttgcgacggtcttgatagcttcaatcaatctgctgaaatcttcggggaacacatcaccgatgtttccgatgcggaaagtatctgcttgagaaatctttcccggatagataacaaatcctttttctttcaattgatgatagaattccttgaaatcgaactccttgtcaggataaaggaaggaagtgatgataggggattggacttcatctttcagtaaggtcttgaatcccaatgatcgcataccttctaccagcacatcatgattacggcagtagcgtgcatgccgggcttccacaccgccttcggctgccagttcgtccatggcttgtttaaaggcacgcactacatgtgtaggagaggtgaagcgccattttccatgtcctttctccatcgcatcccattggtcgtagatgtccaaagaaagactctttgatactcctttacaatattgtaattcggatttacgtgcaatgatgaaaccaaagccgggaactccctgaatacatttgttggcactactgatcataaagtcgatacctaattcctctacatccaatggtacgccgccaaagctgctcattgcatccactatcagttttttaccatgcatctttaccatgtgggctatttcctttaacgggttcaggataccggttgtagtttcgcaatgtaccactgccacatgagtgatttctgcattgtgtgccagataatcatccacatactccacagatacttgttctgtttcatcaaaggctagcatatcatagttcattccatgatattctgcaatgtttcccatgcggtctccgtatgcaccgttgctcagaatcaataatttgtgtttgggcgtaatcacacttcctaaggtcgcctctacacaataagtaccgcttccctgcatcaggatgctggtgtagtcatctgtttttcgtgtagccagttgtactaatcctttacgtatttcctctacgatgtgaacattgtagtcttcatcccatgtgcaccagtcggtcatcatggctgtttttacgctttcagaagtggttaaagggccgggggttaaaagtaagtatggtctcataatcatttaattcattttatggttaataatttcaataatttcgggaagttcggcaatggtgtttactacataatgcgcacctgccatatacatacgttttctgactgctgccatgcgtctgttcaattcttctgcaggcagttttccggtttcctcttgggtgagtcccatttcgttgctgcccagaatcacaccgacagtccatacatcggcattcacaccttctttgatatcggctatcgtatcaccatattttattacgctttgaacggaaggtatggccagatcaatcatgttctggtaaatcatgtagggttgcggacgtcctgccggaaggttgttggaagtcacacagttgtctgtggtatagccatgggcggcggcaccgggcagcacaatgtccatcatggcagtagtatatccggtggtggaacctatcttgataccgtcccttttcagtttctcgattacttcgattacaccgggaataggagtcgtatattcttccagggaggcgaacaagtgtttctcgaattctttgtatatggataccacatcttcctcagtccagttgcggttatagttttgtttgaattgttccgtcacacttggtaacttgaataattcacggatatggtctattttggtcatacccatggggcctcgtgcttcttccattgtcactgtcagtcctttctcggcaaaagctttcaggaaagcggctaccggagcgaagcatccatagtctacagccgttccggcccaatccataataatacactcaattttcttcatcttcttgtttgttgtttatttagttatacttttatttttatgttatgggttacagatgttttctgctgtttcctttaagttggttaacgccatcggtgaaacgatgatctttttatttttttcttcttttctcagctgtttttccaatttataccgttgcatcagatagatggctgaaccgatgaatgcaatgctgcacacaatgcctacccatcctgagaactgattataaaactccatccaattgatatccgggctgcaaaattccttgaacagcagtacacagacagttcctgtatatccgataaagtcgatggtggcaatgaagaatcccacatttcctttaatcttgaagcaggcaatgaagcgctcgaagaacagagtttggaaactaagataaacgatgtacaggctcagactttggaggaacagccagtaaagggtaggcagttgcaatgcatcataattaaaagccagatagctgatagtgcccgctccaccaataaccatagccagaagcacctgcaatactctgtagttgctgtttattaacgacatcatggcaaagattcccaaaataatcagcgtcaccataccgtccacttgtgcgaacaaccaagaagaaatagtgctgacatcaatgatattgaccagaaaatcttcttttatatcacgtaaaatagtgataaacagattggcgaagaacagcatgatcagcaagggcatataacttttgaacagttgtctgcgttgctctccgttcaaagtgacgcgttccgaacggagagcgcggtcttcatctgtgggttgtggcaacttgttgagcgaccaccccatgaggataaggagcgggaaggctaaaccacctatcagggcgggcatccagaattctgtgacaccaaatgtattgactacaaacaatcccatagatttagccattcctgagctcaccgccatacttacccccagcaagctggccaatatatcggtaactttgcgtccttctatgaaactgaagatgactccccacatgcatcctaaggccagtccgttgaagaatagggcaaacacattaaagggttgggggagtaatccgaagaagactaaagcgagttctgcaagggccacggagaatatcatgaatttcaaccggttttcgcgtttcaattctgaaacaatcttgatggcaaagaactttgaaataaggtagccgaaaatctgcatgatggtagtggctactttataatccatcccgaagaaatccattccgtcaaaggtggcagccgtaaaaggtttgcgcagggcatacaccagtgagtatgacagtagtgccgcccctcctgcccacagaataaacaggaaactggatatctgtttgtttgtttcgctttttgcttccattataataattgatattgactaattgttttgcttcttttctttgtagaaacctcattcctcgtatccttggattgctgtttccggaagcaaaagtaggagcctttcgagagagaaaaaatgaatctttatgattaatatttttcatattccacctgttgtatgatgtaacattaatgtaatgtatatgtcattgtatgttcatataaaaacttgtattttgcaaattcaataaagaagaagagaacaatgaatgatttgatagaaatataccgaagaatagaatatctccgtaacaatggtttgaaaatgaaggagatagcagattatgtagatatggctcccagtgtcttgtctgctctttattccagcgttctgcccacttatgtaacctcattgaaacaaggacattctgaagaagattcattagatttggctttggcgcaggtcaataatgtgtcaaaaaaacgtctgttgggcaatttggcaagtaccaaagagttgcttttcagtttggaacctgccaatggtgaggcaaagaccaatccttttatggagatgatgactgccgagatgcaacgttccgtgcaggaagtttataattatagcggaagttatctgagctatagtctttcttcttcgtgccaatgccttaaagtggaaccctatctgatagaggcttccgaagataatacgtatgtgaaggtgactcacatgagtgcctataatacaactcatcggggagtggggttattcaataatcatcagaacgggtatattttctttaatgagcgtgagtcaccgcaaatggctttgttcagtatttatctgcaattgccgatgtatgattttccgccgttccttaaaggtttgtatcttagtctggattacaacaggaatccgatagcgcgtcgtatcttgtttgtaaagcaaggggatagtacagacatggaggaattcttggaactgaaaggggagctggttccacttgataagttgacagaattacaaaagaagtattatgactatacttgtcaggagggagattgtatccgtacctgcatggttccgtctccccaattgaatgaaaatgatttggaaagggaaaaaaagattttgtctttatgattcgtacattggaagcggcttgtaataacaacatattgcatccagtcctgctgcataaacctcttctcttccctgattaagcctttttatacggatgtattctatctccatagtctttggagttatctccataagctttggagttaactcccaaggctatggagttaactccaaagacttgcggagataaaacaaacaggaagaaaacctttaaccatacggcaggaaaggtttagagatatggataagatcttttaaggatgaatcagattacaaagctacgcgttccttatggaggaatacccttttgcagacttgctcgtccactgtagggatggatttcattccattcctgcaatggatgatgtttttgcttatgatagaaatgtacttatattacccgatgcggaaatataaagtttatgcatggcacgagtacaggctacatataacatgctgcggtctatttctgttctatagtctttatcagttacaaatggaacaatcacttcgtcaaattccagtccctttgccatgtgggctgtagtaatgaccaccccattgacaaaagctacactttcttctgtcagcaaacagatcttatcagacaaatgattgatggctgcatacaacttgtccgcttgttttacggttttgcatattatacccatggatacatcagctccttccaggaaagaggtgatgaggttttctatccattctatctctttcttttctgtgggaagcaaggcgactgccggttcctctccatgacgctctatagcttccagttcctcgttcttggcaatgcgttgggcaaactctgtgatttcatacgtggagcgataacttttacaaagcttcatcacttccgagccgactaatacacgttggatctgttcgcaggtggtggaactgtatggatttactgattgctttgcatctcccaatattgttttccggcaagggaataatttagccagaactttgtattgtatcggagtatagtcctgcatttcgtctaccagcagatgcttgatgccatacatggttttattatcttccagggccagtttcaaataaagtaatggggctacatccgcatattccaatttccggtttttaccctgtttgaacatttccggttttcccagccagtcataaaatcccttgtacaagtcaaggtctttattgttgaacatctttttcagttcattacccaactgccgtatctgtatttttcccatcggctcttggtgataggtgaaagtcagttcgcgggcaatttcttctgccattggttggaaacggctgcgcatgggcaggcggtgccatgccgcgaaacgttttttcaggtactcggcagggatagggatacgtcctgctttcaggtcggttggccgaaatgcgttttgttctaaatatagaatgtatttatccatctgctggataaactcggtggtggatttgaatcggatacgttctataaaattttcttcctctttgtccagtatttcggccacctggtcaaagaaggtttgtattttatacttgttatccagtattttgagcattaattcctcaaagccgcattcttcaattttttcttctcccaattcgggaagtacgttcgagatgtaatcggcaaatactttattgggggaaatgatcaggatatcattggacgtgatttcccctttgtgccgatatagcagataggctacacggtgcaaggcgatggatgtttttcctgaaccggctactccctgaataatcagggtgttcgatgtatcattacggataattttattctgttcccgttggatggtggcgactatattcttcatccggtcatcggagtttccactcaattctttctgaaggatgtcatcttgaatattcagtgaactttccagcatgaattccatttttccgtcacggatgcgatactggcgtttcagacggatgttacctttcacttctcccgagggggcgtcgaaatgtgcttctcctaattcataatcatagaacatgctggagatgggggcacgccagtcgtgtatcagattttcattggtgggaggattgaaaaatgagtggatacctatatataatggcaggatttcgggttgccctttttcttgaaagtcgatgcgcccgaaatagggaatggccatcattttgcgataacgtttctttttctcggccaaggactcactggctgctacttgttgggtgactatctgccggaccgcacttttctcggcgcggtccagttcggacagattttcccacaagtagagtttgtgctccattacgtctttggatttatcttcaatggccttatccatctgttcgatattggcagctagtaaagcaataatatccatgagataggctttctcttccttttcagtctggttaaatatcatagcgcgtatttgtttgtcgttttattgctgggcgaaattacacaaatatgcttaatgttattctctttgtatggagaaatgtggatgtaaatttgttctttgtccggttgtttggataactccaatatgaatattgcaggaatgaaagctggtcttttctttgtggaaaaaaggtggaagactttcacaagttccccaccccaaccgtagcaggtacatgtaaaatatacctgaaatgaaatgatttattattttctgcttataggttattacagattgtttttacataaatataggctccatatatttcaccagaaagtatccgccggctatcagccatatatagagaatcgaggcaaggacaaagggctttgctccggccttccggaatttgtcgatactggtttccgcacccaaggcagtcatggccattgtcagcaggaaagtatctacattgttgataaaggcagtcaggctttgcggcagcaaatcgaaagaattgaaaccgatgacagccaggaaaccgatagcaaaccaaggaatggagacttttttcatacttccattttgttctccggctttaattgccggttgggataccatgaagctggtaatgagcagaacgggaaccagcatcattacacgaatcatttttacgataatggcgacatcggaaatttctttgcccattgcgttgccggcacctactgtgtgcgctacctcatgcaaggtcgctccggtgaatatacccatttcattggcagaaagtacgaatgtgccattatgatataatataggataaatgaacatggatatagttccaaaaataacaacagtggaaacagccacggctgttttatagggtttggtttgaatggtcgattcagcgcctagtatagctgccgcaccgcaaataccactgccgatggaagtgagcagtgcgatgccccggtccattttcaacattcgtcctatcaggataccccctagaatagttgttgttactataattgtgtcaataaaaatagcgggcaagcccactgcaagcacatcttgaaaagttaatctgaaaccgtaaagaatgattccgatacgcaagattcgtttagaacaaaactggataccggggacccatgtctcaggcaaattattccggaggctgttagcatataacatacctaaaataataccgacaatcatgggactgaatgataactcttttacaaagttcatttcgcctatataaaaggccgcacatgagaacagggtgatcaagagtaccccatggagcatactgcttcttttttcgcttatcataatttatttttttatggtgtttaaaagtgtcgtacaaaataacaactttagattgggatacaccgaattaaaattcttatagcctataacctttaattatcaaagaagaagaatgttcacggaaaaagaataatgcacaatctctcaaaaaaaagattgtgcgttataatatagatatatacagatcgttgttactggcttttatagctgtttatctgagattaatcgtgcaatgcgggtcttgttctgtgttcctttggtaagcaggtaaacgtgcttatacgcatcacggttcagttcggtaggcgaaccgttgataaggataatgttccggtcattggcaaatttcaggatgccgctgatgttgttgggatgcagtttgcctatttcatccatcatacagtgcaatttgaaatctttgaatttgcgtgacgccccttccttgaacacattcagcaacatgatgtttatcatcgcttttaccagaatgtcggttccttccgaccccacattggctatcttctcgataaatccggtatcattgccgttctccacaatgcggaaacgcaattcgaaggaatcatacaggcggatgctgtcgtagcggtaggcatgtatttccttgataaaggtacgtagcaaagtgatcgcttcttcttttaccaattgctccttggcagaggaaaacaggttggtttccggtgagaggtcatagccgtaatcatggtaatatttctgtatctcacgtagaatattcactacgcggttgctgctctcttccactttcatttcaatgcgctggataactcctacaaagttgcaggtagcgaaacctttattgatttcacggatcacatcttgaatatcatcttctgatgaagtcagcatggaggtatccatactgatacgtttgaaggtatcccaatgttcattgttaatgcgacggatgtactcgtctatgcggttctcttccacaaagtcgtgcagctcgtcggcaaagcgtacatattcccaatcctcgttgaactttacgcggaacttgaaagtgttgtcctcatcaaaatgtccggtgaaaaggttcacttccttgcggagcttgctttgtacctgtgtgaattggttggcctggcgggtcagttcgtcaatcagctccatacaagtcttggtggtctgtatggtctgtgcggtttcagaacggaatatatcctgatgcggtttgtaccagtcgtatgccgaaatcttactgtaggcttccaagttcttttgcaattcccttacattttcttccgcttcttccagttctttgttcagaaggtctattttttcttgcagggaagatgtttccgctctcagcgtttcccgttcctgctggagcagatgtttctgttcgtcgtgttcccgttgccatccggggatacggtctatcaagtcccgtttatctttctgatattcgatgaccagtgttgcgttttccttaatgaaagaaagttctttatccagttgagccagttggttggcaatatcttgcaaacgttcggtatccgccccctgcgagtgaagctctttttgcatatctgcttcatattcagctttgatggaggagattcttcgttgctcttctttttcttcctttccgataatttccgcctgtgtctttttttcggtggcaagcgtttgctgctgctggttccatgcctgtttcagattatccagtttttctgttttctccttgttcaggttttttagtttgttgtttattccttccagttcggcagcccgtttgcgcttttcgttttccaattggtttattttggtgttccgttcctcattggctttcttcttccattcttccaagtcgagcatatcctgctggtattggcgttccaattgttccagttcatactctatttgactgatgagatttttttgctcctttatctgcggttggtatttgcgtttcagctgctcctgcacttcttccttttcagtttgcaggtgttgcatggcggcagtgatttcttccagacgcttttcaccgttttctttctcggctatgtagtcgtctatagacttgatgggacgatggatgctgtctaaatttatggaaatgccatagaatgagttccccccttcaatggtactttgcgggaaaagtccccgttgccataaaatactttcatcacacagtttgccgatgttctcttcccatccttttttgttttctttcagccagccttgcaaggtgtctttgctgttgttcagaaaggcttgtaattcgtctatgcgaggacgcagttgcagcatttcctgttgcagtttctgcaaggtcaagtctttttctttcaacagtttttgctgttcctcttcccaagtcatgatcagttccttgatggtgagctgcgcttgggcaatacggttttttcgttccgtgtgaaagttggcataattctggatgcgcgctttcaattcctgctgctcttcctcaaagaaaatttcctttctgcatagttttatctgataatccatagcattcagttcactcagtttctcggctttcagcggatggagctgctgtgacagggtttcaaattcctgataaagggaatcggtgaagcgctggtattccttgcgagcctcttccagacgctcgttgtacgtattgtttaacgtgtccagttgcttgatttttgcttcatgaatcttgttccattgctcgtccagggtctgaatcagtgatttatacttggtggagatttccatatattgtgaggtgaggatgcgttgttcttccagcaatcccacctgccggttcttccattcttctttcttggaagaacgttctataatctcttctatgttctttttctggtagtccttttctttgcctaatgccttttgcaattcgttgttcagcactgccagggcttcctgtaacttgtcgctgcgcttgcgcgattcatcttgaagctcctgtttccggcgtatcagttttcccttgccggcatctgcgcggtcttgtttctctttccattggggaaggatactttcggctttgtgaaaagcggtgaccagttcgcggcagttctgtaccagtccgccttgcagttgggaggtttgttgggataatagcgtgatttccctagcttgtttccgggtttcccgtttctgaaattcttcgatgtccttcagacgagtctcaaagtttttcagatgctccttgtaactgttcaggtcgatggctgtttcgtcttcgttcagagaagaaatgattgtttttttgataaattcagcatccagtttcgaattcaacaaaacgttttgtatggtacgcggaatattctggtattgcttgctctccatcagcgagtaccggctgaactcaggacttgtactgtttccatacagaatgttccgatactcgtcgtaggtatagataatgcgtgaatattctattccatgttggtccagcacagcacgcacgcggtcactctcgctataggccatccggttctcatctataaagaattctttacggtaaggagagtggatgaagcggtagcacacacggttcatcgacttgaaactcagaatacagaatgcatcgttctctgttgccacttcgtaaacaatgtacgagttggagtaggggaaatagtaatccgtgtaattttgcttttccaccgaaatgcccagtcgttgcgtgtcggcattataaaagaaaaggatagcacgcagaatggtacttttccctactccctgcgtgccgatgaagtgaacgtttccgtccagataaatatcgtccgaataagggatattcgcactattgataaagattattctactcaggtttctcatcttcggtttcgtcgtaaatgttgatactttcaatcagtctttccagataatgccaggcgctcatcaccttatacgtattcgttttttcgttttcttgttccagaaacgagtctttggtgagctggcgtatcatgttttccagtacttccttgcggatgtccttgtccgagaagtgtttccgcataccgtccagtttgttctggagcagcatgttaatgttggtttccaccaatatctgttcgggctggaagcggaatccgggaccgaaagtttcatcgtaagttttgaaaaagtcgagcacatctatccagtaataggcacgcatgattttttgttccagtgtggctttaggttctatacgcgagaagaagaaatattcgtttccacgttccagcgtatagtttatctgtgaaaaatactgatagaggggctcgtaattctcatctatttcattatacatatcgcgtacttcttcactggtgctgttggaactgatgaacagtcctttctgcaggtattcaaagatggacgcggtattatcgggtatttgtatatttaaatccataattctcagagtggatatattttagcgtattcatattgattgtggagtccgaactcgttccggatttccagttggttttcgtaaagtgagacaatctgacagaagaacgtggtgcgttccttttcgtccacttcgcgatggaagtgatactgcaacagaaaagagaaaaggtcgttgaccggttctcctttccaacgggcttctgctcccgactgcacaaaggcggtcactacttcgtccagattaatcacttcttcatacatggcctgtgctttcaagtcttcttcactgaaagccccggcttcatttttccgcacaatttcacggtacttctgattgctgataactttcagaatgatgggacgtgcttcgtcactggccagataggcaggcgacagtttgaacgatgcttgcggactgccttccagcaggagggaacgctcccgttccatgatttcggacaggttgcttcgggcacgcagctcgaactggtcttgcagatattttacttttcgtatcttttctaccagtatcacctgattctttatctggttcagataattgatgatatcctgttgggcacgaatcagactgtgggctgatagttgcagttcctgtcgcagttcgagcagaatgcgagtcagctcctcatcagtggcctggcggaagaaatctagttcttcgtgcagaatcagatgttcggtagagtctatcaaccgctggatgttgattcgctttttgtccagattttgcagtttggctatttttatctggtacgtaggttcgtgtttgaaagcattatcaatattgtgttgaagattgataatgttccgtatcgttacacgtgccagtttctgaaaggtaatcttgatattgcgtacataactttccttgcgcgactggatcttttccttcaggtagtagtccatcagttcgtgcaggtactctatgttttcctctacggtagcagtattgatttcctcgtttgcttccagcagcagttcgaagaaatcaaggaatcgggcatccagttccacaaagtttccgttttggtgtatgatttccttttcgatgagtatttttaaacggttttcgtcttctttcaatagggtgagtgcgtccgagtatcgaaaactgtgtacctttctcttctcaaacatctctaccaacagccctttagctacaaaaatcgtatttataatttcgtgaattgaccggaatatatacattgtttttttcaaaaaagtccggcgaagttactccaaaaggttggaaaaacctagcgttttatgctaaaaagcatataaatagtgaagtaaaaggtggaaaatgctgaggcgtaaattagtaagaaggaggtcgttgtatggagtttctgtcgcttgtatgatgctatatttttcagatgcggttgacacgaataacgtagttagaataaagatatccgtgccatcgcatctggaaaatagaatactttaggaactttacggtaaagactgataaaccgggtgcctatgttttagaactgtttagttgtgtgggttatttgcaggctagttcgaatatctctttactatattctttgttcagcttcacataattgcctacccattctcccttgttttcatgtagtttttttaccagcagttcaatgtcaggatgttctatacctagttctttgaaattgaccggtaagcctatgtatctgaaaaaatgtttcaatcgtgatacaccggcaagtgccatctcttccaaatcctcattttcgggaactccgaaaacacgatttgcaaactgggcaatcttcttcggattatgttctgccatgaatgtcatccatgcaggtacgataactgccagccctgccccatgcgtcacattatatacagcactgatttcatgttccagaaagtgtgaagcccagtcttcctcacaacctactccacacgtaccattatgagcaattgttccacaccacatgatattggcgcgtgcctcataatcgtttggattctgcttcactttgtatgcttctttaatgatagccattaaagttccctcacacagccggtcactgatttccacatcgggagtattggtaaaataacgttccataatgtgtaccatcatatcggcaatgccacaagctgtctgataggggggaagagtataggtcaattccggattcatcacagcaaaaacgggccgtagtaattccggtacacgcaaacttagtttctgcagaccttccagtttggtaatcaccgtattgcccgaaccttcgctaccggcagcgggaatagtaagtaccacacccacttttaaggccttcttcactttggcttttcctatatagaaatcccaaaaatcaccttcgtaggacactcctgccgcaatggcttttgcggtgtcaataacggaacctccccccacgggaagcataaagtccacgccttctttgcgggccagttcgatgccttcgtacactttcgggtcagtaggattaggctgtatacctcctagttttacatattccactccggcctgttgcaatgactcttctatgcgttgcagtaatccgctacgaataatagagcctccgccgtaaacaatcatcacctttcgggcgttatactttttagcaagagttccggtttgtccttctgtatccttaccaaacacaaactcggtagggctataaaatacaaaattgttcatttgcttattccttatattattttgttatatgaaaccaaagcaaagttaaggaaatatattacctttgtcgcctaaatttagtaaaaagatgaaaacggacattgaaatagcacgcagcattgagctggttaaaattaaacaggtggctcgggaaaccggtattcctgtagagcacatcagtaactacgggcgctatattgccaaggtggatgaaagtcagatagatgaagaaaaggtgcaacagagcaaccttattctagttactgccattactcctacaaaggccggtatcggtaagactaccgtttctatcggattagctttgggacttaataaaataggaaagaaaaccattgtagccttgcgcgaaccgtcattgggtccctgtttcggaatgaaagggggagctgccggaggaggatacgcccaggtattgccaatggataagattaatcttcattttacaggtgattttcatgccatcacttctgctcacaatatgatttcggccttgttggacaattacctttatcagaatcgtgataatggtttcggattgaaggaagtgctgtggcgtcgtgtgcttgatgtgaatgaccgttcattgcgttatattgtcacagggctggggccgaagaccaacggaattacccaagagtcagggtttgatattactcctgcatctgaaattatggctattctgtgtctggccaaggatgaaaaggacctgcgtcgtcgcattgaaaatattttattaggttttacgtatgacaataaaccttttactgtaaaagatttaggagttgccggagccattacagttcttttgaaagatgctctttctcctaatctggtacagactacggagcataccgccgcttttgtgcacggtggtccgtttgccaatattgctcatggttgtaactctattctggcaaccaagatggcaatgactttcagtgattataccattaccgaagccggattcggggctgacttgggagcggagaagttttatgatatcaagtgccgtaaggcgggtattacacctaaattgaccgtactggtggttactgcccgtgcgttgaaaatgcatggcggcgtatcacaggataagataaaggaacccaatctggaagctttgaaacaaggtatagccaatatggacaaacatctgcgtaatctgaaatatttcggtcagacggttgtggttgcgttcaaccgttatggagatgattcggaggaagaagtggattatatccgtacccattgcgagaagaaaggagtgggatttgccgtaaacaatgcctttactgatggtggcgaaggggcagtagaattggcggaactggttgtgaaaaccattgaggaacaaccttccgagcctttgcaatatgcctatgataatgaggatagtgtagaaactaaaatatcgaaggtggcttgtaatttatacggtgctagcattattacgtatagtgctgctgcccgtaagaaactgaagcatattgtagaattgggatatggagatttccctatctgtattgccaagacgcagtattcattctctaccgaccccaaaatttacggtgcggtagataactttgaattccatgtacaagatattgtgatgaatgccggagctgagatgctggtagtcattgccggagaaataatgcgtatgccgggattgccgaaggaaccgcaagcattgcatattgatatcgtgaatggtgaaatagaggggttgtcgtaacccctctttttttactgaacttatactgtgttacattgacgagattaaacaccaagtgtaaatggaaagtccgatgcctattaccaatcctacagatgaccatctgataaacaacttgtctttatatttgcagccatagcataagcctgtaatggcgcacatggaaattccgattggaaatacaaagaatcctattgagataacccccatgagtataataatacccatgatggttagaactttgtttcttgctgtcatggcttttattgtttggtgttgaatgtatatggattatatatggcagtaaaagtacaaaattattgtttagaatcagacttttatccgttttttatatatttgcattatctaaaaagtggatagatggcagatgtcttgactcccgaacaacgccgtaaatgcatgtctcggattcgtagtaggaatacaaaaccttctgtcagaaatgagaacctgaataggttattgtttacgctggaccatttgttcttggaatatttcgcagtacgtcatgcagtttcgtatggagagagcggtagagaattaaatttggttgcggccgaagataaaacggaatatgagaaagataagcctttataaaaattgaactaatcagtaacgacaaaatggatatgaaacatgtaaagtatctggctcttgtcctatgcatagggaatctgtcgcctgttatggcgcagacagcctcgaaaagtctcacagtagacaatttagttgcttggcagcgtatcagcgggcaatctatttctgataatggaaagtgggtggcatgcaagatggaaccttgggaaggggatgctgtggtgaatttgtatgatgcacaagggaaggaacttgccactttcccgcgggcagaccgttttcttttctcggcctcttccgactatttggttgtgtcgcagaaacccggcaagatgatagtggattctctgaaaataaagaaaacaaagaaagataagttgccgatggatgcattggttatttattcgcttttgggcgacagggaagtgattgattcactgaaaacattcaaactggcagagaaggtggactgggttgcttttcagaagggaaggaaagactcgactttgtatgttcaaccgttgaatgcaaacctcagtactcggtatgaggctcctgctgtgaaagctttcaactttgcggagaaaagcggaatgctttattatataaccgcaggtgataaagcagaggaaaagccgggattgtatcttctgaatacggaaacaggtgtgaagacgctgataaaagaaggtgacggggtgtttaaacaggtaacttttgatgaagatggagcaaacttggctttcttatattgtgcacagaaagattcttgctataagggcatgagcttgtggttgtcacagcagggagcaccggcagaagaaattgcggcacgtggcaatcaggcttttccgaaagggtgggtgatcagtgagcatgggaaattacaattttcgaagagtgcttcccggttgttttttggcacatcgcctgagcctagacaaaaggatacgttgcaattggcggagaaccgtcccaatgtgcaggtgtggagttgggacgagccggtgcaatatactgtacagaattataataaggagaaagagctgaaaagaagctatcaagcggtttatcatataaatagtggtcgtatttgtcagctggcagatgaggagttatctcagattttgttgggagatgaaggagatgccccgttggcattgctttccacttcgcgtccttattcattgtcctccatgtgggaagggcggacacgcagtgattattacactgtgtctttggaagatggcagccgtaaattactggcatcggcggattatggcagataccgtctttcaccacaaggcaagtatgcgtattggtatgctgaaacagacagttgttggtatactctttctatggcagatgggaaaaaggttcagttgactacccctgtttctttcctcgcatgggatgaagagaatgatgtacctgactatccgaacgcacatggaactgccggatggacggaacgggatgagtcccttttaatttatgaccgttatgatatttggaaattcgatccggatgccatgaaggaacctgtcaatctgacgatgaatggacgtaagaaccggatttcatatcgtttggtaaaactggataaggaggagcgtgtggttgacctgaacaagccacagttgttgaaaggctttaacgaagtgaccaaagggaacgggtattacaaggctcgtttttccaccgctgcttctcccaaagaattgatagcgggtaactatatgttacgcagtatttataaggcgaaaaatacagaccatgtaatctatacgatggaaagttttgagcaatatcctgaccttcattatgctacactcgatttcaagaaatctattcggttgactcatggcattgaccaacagaaagactatttgtggggaactgctgaattggtttcgtggatatctttagatggtcgtaagttggaaggggtggtgtacaagcctgctaattttgatccggccaagaaatacccgatgattgtgagtttctatgagcgaaattcagaaactctgtttaattaccggatgccggaaccgcatcggtctaccattgattatcatttttataacagtaacgggtatattgtgttcaatccggacatacgttatgtagacggttatccgggtgagagttgctataactgtctgatgccgggggttgccatgctgataggcaaaggttatattgacgagaaagccataggtgcgcagggacatagttggggcggttatcaagtggcttatctggctacacgtactgatttgtttgcggctattgagtcaggtgctccggtggtcaatatgttcagtgcctacggaggtatccgttggggatcggggctggcgcgctcgttccagtatgaacatactcagagccgtctggccggtacgccttggagtactccgttgcgttatttggaaaactctgctctgttcacgatggacaaggtacaaacacctgttttaattatgcataatgatgctgacggacatgtgccctggtatcagggaatagaatattttgtggcaatgaaacgtcttggaaagccttgttggatgctgaactatacaggcgaaccgcattggccgacaaagattgccaacaaaatagattttcaaaaacgtatgttccagttctttaatcattatctgaaaaaagaagcaatgcctgaatggatgtctgacggggttccggctgtagaacagccttatgaattaggatactgatattatgtgttcggacgactatagaattcaagctgctcctactgtggataaagtaaaaggatagttcctgaaaagagggaggaggtgtgtcaaaactaaaatgacagctccgaaaagttacagatagtaattataaacttaaaagggtcgtatcaagctctgtattgactaatgatacgaccctttctttagttttttaggatgctcaaatttcaaattataaattcatattttcaaaaactgagttttgatcctctcttattctttttagtacaatgcttttttattcaaacttaccataacgggtaggcaacagtttgcggtcacctaatgtattatctacccgggctacattgatccagaatttgttatcacgtaccgattcgataggataagcggctttctcgcggctgtagctgtgattccattcattggccaccacttcatattcaggatgcggggcgttgaccaatacattatcttctttatcggcactgccattcttcacttcttgaatttcctgccagatggtttgcatcacagtgacgaaattatccagttcccataaactttcactttcagtcggttcaatcatcaatgttccatgaaccgggaaagaaagggtgggcgcatgatagccatagtccatcagacgcttggcgatgtcattttcgctgataccggtttcgtcatgcagatagcggcaatctaaaatcatttcatggcccacaaagcccgtagcaccggtatatacaataccgtaggtatccttgaagcaggctgccagataattggcgctcagaatggcagtcttggtggcattggtcagaccttcggcgcccatcatgcaaatataaccgtaagtaataggcaggattcctgcgctaccgtatggagctgaagaaacctgattggcactgttaccccaaacttgatgtcctggaaggaacgggaccagatgttcggctacacaaacgggacctacaccgggaccgccaccaccgtgagggctggcaaaagtcttatgcagattcaaatggcatacatcagcaccgatggtacccggattggtcagacctacctgtgcattcatatttgcaccatccatgtaaacctgtgctccgcatttatgaataattttacaaatttctgcaatttccggttcaaagataccatgagtggacggataggtaatcattaatgcagccagatcatccttgttggcttctgcttttgcacgtaaatcttctacgtctacattacctttatcgtcacaggcacaagtcaccgtggtatatccgcattgaatggctgaagccggattcgtaccgtgggctgatgccggaattaatatcttgttgcggtgtccctgtccgatactttccagataagcgcggatgatgcgaagtcctgtatactctcctgctgcacctgaattaggttgcaaagtgattcctgcaaatccggtaataaccttcaactgctcgcttaggttattaagtagtgtctgatagccttttgtttgatcctcaggtgctaacgggtgtatagccatccagcctaagttgctgagtgggagcatttccgaagcggcattcagtttcatggtacaagaacccaatgaaatcatggaatgtgctaatgagatatctttacgttccaaacgtttgatataacgcatcatttcggtttcagtatgatacttgttgaatacctcatgggtgaggaaggaagtacggcggcgtagttcacgattcagtgaggatgcttcgggaatgtctgtcacttcttgaacggtttcttcggcagcaatggagaagatggaaagtaacaggtttacatctttcaggtcggtggtttcatcaatgctgaaacctacatcgccattatcatagtaacggaggtttacttctttactcaatgcgatggtacgcagcttctgagccgaaacatggtcgggcagactgaaacgcagggtgtcaaagaataattcattatgctgtacatatcccaagcgggttagggctttgttcaaccaggtggtaatgctatgaatgcgttttgctatatttttgataccttcctgcccatgataaacggcatagaagccggccattgtagccagtaatgcctgtgcggtgcagatgttggaagttgctttttcgcgtttaatatgttgctcacgggtctgtaaagccatacggtaggccagtttgccatatttgtctttagaccagccgatgatacgtcccggcatattgcgtttatattcgtcacgtgtagcgaagtaggctgcggacggacctccgtagaacaaggggatacccaggcgctgggtacttccgaatacgatatctgctccccattcgccgggaggaactaataatgccaaactcatgatatcagcatccacggctactttacaatgggcagcatgtgccttttccacaaactcacgatagtcttctacgctaccgctggcattggggtattgcaggatgcaggcaaaaaattccggagtaaataccaattccttgtaatttcctacttggatcttcatgccttgcggaagggcgcgggtttggatgactgccagattctgtgggaaaatctcttcatccacaaacaatacattggctccgcttttttgttggtcgcgggtgcgaagtccatgcatcatggtggcggcttcggcagcggcggtagattcatccagcaatgagcagtttgccaatggcatggctgtgaggtcggatatgacagtctggaagttcatcaatgcttccaaacgtccttgtgaaacttcggtttgataaggagtgtacgaggtgtaccacacaggattctcgaatacattgcgttgaatgaccgccggagtaatactatcataccaacccatacctatataggaggtataaatcttgttttgtgaagctagttcggtaatgtgctctgcaaactcccgttccgtcatgggagcagccagtggcagaggttctttcaaacggattttggacggaattgttttgttaatcagttcatcaagactctttacgctaatcttttccaacataacgggaaggtcttcttcctgtataccgatatgtcggtctgctaataaatctgttttcatggtagtagtatataagttaaattttaagttttatcttatcggaaaaaagggttgttcgctttttctgctcccacagtggtcgggtctccatgaccaggatagactaccgtgtcggggggaagtacaaacaaacgactgcatatatgttcgcgaagttcgtcgaaattacctcctgtaaggtctgcacgtcctatacttccttggaacaatacatcaccgctgaagatacagtggtcttctttgcagtaataaacaatacttcccggcgaatgacccggcacatggatagcttccagttgggtattgccgaaagtaatgatatctccatcaaagatatattttcctaatggcacgggtgcttcgggcaattggaagccaaacatacgtgattgtgccggggcttgttccagccaaaattcatccgcttgatttgcttcggcttttagtccgtattcttgtaacaggaatgggttgccgaaaatatggtccagatggaggtgcgtattcaataaatgtttcactgtcaggttattgctgtcaatatatctttttaaggcttgcttttcttcttcataaaagcaaccggcatcaataatgacggcttccttcgtttcgtccgataacacatagcagtttaccggaaacatattgaattcaaatttctttattttcattgttcttttatctatagttattaaccgttgatggttacataaaccactttcttagttttaaaaaaatcttctgtgaattcatctttcagatcataaagcattgttttgtgcttcacgggcattgtttcttgttccaactctccgcctttcaggcaaatcagcccgttgggcaggacgttatgctgttcttgtctgatgtttttacggataatttttattaaatcgcccaaaggcatgacagcacgacttactacgaagtcgaattttcttttttcttcttcggcgcggcaatgacggaaagtgacattcttcagtccgatagcattggctacttctgtagctactttcactttctttccgatactgtccaccagatgaaattggacttcagggaataagatggccaaagggatacctgggaaaccgccccctgtgcccaagtccataatttgggtatcaggggtgaagtttatcactttggctatgcctagcgagtgcaatacatgatgctcgtacagattagcgatatccttgcgtgagattacattgattttgctattccaatccgtgtataaatcatacaatgcggcaaactgtgttttctgctgttcgctgaggttagggaaatatttcagtattaattccattctatacttaaaatcgttatttaatgtatcatatatttttctaccgatgtgtagggtaaagaaagggtgatgattcctacagcatagggagcgatatcatatttgttatacaggaaagatactttttccttttctaacaagaaattgtcgggtacatacatattggtagaattcaagatgcctgcattctgaagtccttccagtgaggtaatggagctgtcttccaaacgggtagccatttctgttatcagttcttccagcagcatgtcacttatcggtttttccgaccctgccataaatacatctttcaaagcaagtagtttgccggtatttttttcgaagttcatccatttgttccatgagttgggatgtgctccgcctgtatattcaaaagtttctgcaatgaaattcagaatgccttctttgccttcgctgaaataggtggtcagtccgtattcataattgtaccatgtgggaagttcgtctttgggagttccattttttatatcttcctgatagaactcgttcacatctttgcggtagttgttaatgtaggtatttttaaaagaatctacagcgacttccggattcatccgggtatattcttttcccaaaatgtgggcttgtatggtgcggttgatgcgttgtactatgctatccgcagcatcagattttgctaaataactataatcaatagtaatctgacaggtgggagagactgtgtcatcttgtaaatgggcttgttcttccacctttacagtcttcactgtttcactatcaatttgtttttgtccattacatcccgataataaaaagcaggatacaaggcaagttgccataacagacaatacgagatttctttttttcataactttttgtttatttgcatggattacttatcctaactttctccacaaatatagaataacttcgtgaaatgtccatctaaaaagcgaaaatatatttatctgtttgcaacaagattgcatgaactttttgctaaatttgtccgttgataagctataataaataagtaaagaaatgaatatgaacgatatgacaaaaaaactatatcccgttacgggaatgcattgtgcggcatgtgccggcaacgtggagaaaattgtaaggaagcaagaaggcgtggaaaatgcatcggttaatttggcgacggctactttggcggtgacttataatccggatattgtgtctccgcaacaactgaaagaggctgtgatgaaaataggttttgatttgataatagatgaggataactctgtacaggagcaagaggaagcggagcaatcttattacggactgttgaagcggaagactatcgttgcttggatttttgctttaccggtagctgttttggggatgtttctgatgaatgttccgggagtaaactggtggatgctgttgctttcacttcctgttattttatattcggggcgttctttctatatgaatgcctggaaacagacgcttcagcgtaccagtaatatggatacgttggtggcacttagcacctccatcgcatttttgttcagtttgtttaatacgttctatcccgaattttggtacagccgcggattggaacctcatgtatattatgaagctgccactgttataatagctttcgtattggttggcaaactgatggaagagaaagcaaaaggaaaaacttccacagctattcgtaaactgatgggattacaacctcggacggcccgtgtggtgaaggacggcagggaagaggatatcttgatcgccgacctccaggtcggcgataaggtgagcgtccgtcccggcgagcaaattccggtggatggagtcattgtcggaggaaatacctttatagatgagagcatgataagcggtgaacctattcctgtagagaaaaagcagggtgataaggtgctggctggcactatcaatcagaatggtgcatttattatgactgctcaaaaggtggggaaaaatacggtgttggcacagattatccgcatggtgcaggaagcacaggggtctaaagctccggtccagcgtattgtggataaagtgacagcggtttttgttcctgttgttcttgctgtggctgtttttactttctttatttggatagtggcaggtggagcggatgacttttcctacgctatgctttcagcagtgtctgttttggttattgcctgtccgtgtgccttgggacttgctactccaactgcattgatggtaggaattggtaaaggggccgaatcacatattttaataaaggatgcagtagctttggagcagatgcggaaagtggatacagtggtacttgataaaacgggtactgtaactgaggggcgccctgtggtgaccggctggttgcatgatgccggatggcagaacgagcataagggaattctgtatgctgctgaattgaaatcggaacatccgttggctttggctattgtcgaggctttgaaaaaggaaggtgagaagccggcaatcattgattcttttgagagccggacaggacgggggattgtggtgacccgtggaaataaaactttttgggcaggaagccatcggttactgaaagattttggagcgggaatttccgacttgttgaaagggatggtggaggattatgagaagagtggcaagagtttggtctattttggcgagggaaatacattgctggcggttatcgctattagtgataaaataaaagatacttccagacaagcggtcaaacaattgaaggagagtggaaagtatattgtattgttgaccggtgacggtcatcttactgcacagaatgtggccggagaaattgatgcgaatcgttttatttcggatgctttgccggccgataaggagaatgttattaaagagttacaggctgaaggaagagtcgtagctatggtaggcgatggcattaatgactcgcaggcgttggcccgtgccaatgtaagtattgcgatgggtaaaggtacagatattgccatggatgtagcgatggttacgttaatgacttcggatttgttgttgttacccaaagcttttaagctttcctataaaactgtacggttgatccatcagaatcttttttgggcatttatctataatttgataggcattccagtggcggcaggtattctgttcccactatatggtattttgcttaacccgatgattgccagtgctgccatggcatgtagttctgtcagtgtagtgttgaacagcttgagtctgaattggagaaagttgtgattgaattaaaaataaataaaaaagcagccgtgcggagattttgttttgcatggctgcttttcatttttccattttttagtttataatttaaaaaggattgtttctccctctttgtacttctattcgtattccgaagttcccattttctgatttcatttcgaaagctccattgaaattatttctttcccaaggcaatgcgcttggatttcgtactttgttcccgtcagcgtcatattcaccgtatgtggttatgtgtaatccgtttttcaatttaaaggttgcactttgtaaggtaggaggcattgacattgttccgaatccatagattcccattcccggatacatgggggtaaatacatggttgtaagaccctctgtcataaatgatattcatattgggacggaatatttcattgtaattcgcaattgtattattgttgtaaggctgataataaagttgcggggctatcagaggggggggaggggccacaatcatggaacccatatccagcataaatccgttaaaattcttgtaaccatccaatgaaatgggcggaatactatctgttaccacttcggactgcgcaaaggtagtagcggcaatcagaaacatagaaatggatagaaccagctttttcatatactgttattttttttgttccggacaaatatagggatattttctaaattctgtatcgtttctgtttcctgtgaatagatcttttcaaatactttatgaagttcttcctcatcggctatcagttgtcgtaattcttgcagatgtacagcattggctgattgaggtatccataatcttaaataaccactttcagcatacttttctttcagatgtgccagaaaacgtatgtattgtttttctttgtctagctcgggatagttggaaagaccatattgtaccgtccgtctcaaggtgatgtccggatcaataatacggtcggcctccgctacaattttgccataaatgctacgagggacatgcttgttggatgcacggtgatcttctactgcctctttcataatcaaaatatgctcttcagggaaccatttccttaatttcttgtccgcccatagtattttccctgaaatgagatgatggaactctcgtccctcacagagtcccagatcatggtaggaggcaataacatacaccatcatgcggtttacgtcataatattgagacaatttgaggctttctgctataactttcaatacatgatctacacgatgtgctttgtcaaaatcagcgtattgtgggataatttcacttgcgatatagtcgcggaactccattggaaaatcattgatgtacgacaacatattctttcttttgattggggttgcaaatatacaataattatcccacctttgcagaaaaaagtaatatgtatcaaattattcaacctacacccgatgactttgatgaattgacctgtttatgggaagcttcggtgcgtgctactcatcatttcatacctgaagcatatattcagaagttaaaaccactggtatggagtgtttatcttcatagtatgccgctttacatgattcgtgacaatgctggtatagaaggattcatgggcattaatggaactatgcttgaaatgctctttgttcacccgcgtgccataggtacgggaataggaaaacaattgatgcgttatgctttggaacattgccatgtacgttatgtcgatgtaaacgaacagaataagaaagcgtccggcttttatagccattttggatttcgggttattggcagggatgcaaaagacgcatcgggcgaaccctatcctattttacatttaaaactgggaggtatcatgaaaattgaaaattggggattagttccctactctgaggcttgggagcggcagacggaattatttaatgccgtggtggaagctaaacaagtgggaaaaacgtatgaaaatagaattatctttgtagaacattcgcatgtctatacattaggcaagagtggaaaggagacgaatatgttgttgggggaggcgcaattgaaaatgattggtgccaccctttatcatattgatcgaggaggggatattacttatcatggtcccggacaattggtttgttatcctatcttgaatttggaggattatcatttggggttgaaggaatatattcatgtgttggaagaagcggtgatcagggtctgcgcatcttatggcatcgaggctgggcgagtgaagggagcaaccggagtatggctggcaacgggaactccgcaggaacggaaaatctgtgcaataggagtgagaagcagtcattttgtgacaatgcatggattggcgctgaatgtaaatacggatttgcgttatttcagttatatccatccttgtggattcatggataaaggggttacttcattacagaaagaattggggtgtgaagtgcctatggaagaagtggcaggacgtgtgcagaacgaattatctgaacttttgtaaataggatatgtaaataataccgtatgtgtacccttatacatacggggtgtgagtgtatcaaaagtccgatcgtgctatcatgtcgtcagctgtaggggcagggtttgtctgcccaaatgcataagcaaaccattttagggtgagcgaacctagctcctactagcaaaatgatacgccattttacttttgatacatccttgatttattcttttatatcttggtacaagaagcgcttgatacttttcttggctgttttttcaaattcctcaggatatagcttgaagcgggctatttgggaaaatgccggtaattgtttgttcagttcaaggcgattttcttccattactcgtacaaggtctgattggttcaagccgtgagcaaaagcatcatcggaatccggatagattaggcccaccagtttatcttgttgcagaataatcagtgactctgatacgtatggcatattgtttagcttggactctatttcttccggataaatgttttgtccggaagaagtgagtaacaggtttttgcaacgtcctttgatgaaaacatttccgttttcatctattgtcgccatatcacctgtatgcaaccatccttcagtgtcaatgacttgccgtgtcgcttcctcgttcttataatagcccaacatcaggttggctccacggcataccagttcacccgcaatggctgatgggttgggagacagtactttggcttccatacgtgcggcaacttttccgcaagatgccaatttcagttctgtccaatgactatggcaaatgatgggaccacattcagtcattccgtatgcaatggtgtatgggaaatctatcatttttagaaaggcttctacttcggcattgaaaggagcacctccgatgatgatttcgatgaaatttccgccgaaaacctccatcgccttctgcttgataagttcttttatcttatcactgatgatgggaacatgtaatagcagtttacctaatttgttgtctactttgggaagaatatttttcttgaatattttttccacaatcagtggtacgcaggctataacgcgcgggcggatttccgcaaatgattcggctatgattttgggtgatggcatacgggtaagaaaccatagatgggcgcctgctgtgaaaccgtaaagaaaatcgaaagtcatgccgaatacgtgccccaaaggtaacatggatacgacgctgtcacctgctttcagacctattttttctttacagtagagtacgttggagagtatgctgcgatagggcagcatcacgcctttggaatatccggtagtacctgaagtgtaattaatgatggctaggtcttctgatttttctttttcataagaaatatcatcaggacggaatcggcaggggaatttgtgtccgaatatctcattcagatggtcgcgggcataagctagtttttccgaacgggatacgggtacgccaaaatctttcaattctatgataccttccaaatgaggcatagctgcttcattcaagttctcccatatctgatcgcctacgaacaacaggcgggcttcagagtggtttacaatattgtgtacctggtcggctttgaattcatgtagaataggtacaactacggcaccataggtgatgacggcaaggtaagttactgtccaatgagcgctattacgcccgcaaatggctattttatctcccttttcaatgccggcattttccagcaagatatgtattttctctattttacgggccacatctctgtattgcaatgtgatgcctttatagtctgtaagagcgtttaaataccaatttgtttttatactttgctcgataagagcaataaaactctgttctagttccatgataacttttgcacatttataggctgagtgtgcgcaaaagtagtaaaatgaggtaagggggatgggaaatgaaacagttttttacattaatttaacgtcctgaaaatgtagatcctttcatccctttactttaaaatgctagtttataatcgtttgccaattgttgacgtgtcctatgaaggagtatagttgctataattgccagaataagagttaaccttgcccgataccatgatatactctttgtttcaatgatagtcgggcaagttcgaaaattgtttctataattatgggatttctcgataaagaagctttatttatcgttgcttttattttctgtctcttctttagaaggctgtggtttgatgataagtcgcagggatgggtcgtaggtgaaataactccacatccaatctataaaaataaataaacggttttttacccccactatgctcatcaagtgtataaatagccatactgcccatgcgggaaatccactgaaacgtatcttttgcaattctaccactgcattatttctcccgatggttgccatagaccctttattataatatttaaaagggatgagcggctggcccttttcgatatttctcagattctttattaagttcatggcttgctgtatggcaggctgtacaacttgcggatgtcctttaggatactcttctgaaatcattagtgcggtgtcacctatagcaaatatatttttaaagtcttgtatctgattgtgttcattcactctcaaacggttgcctggaccatagcattcggcaggaaggcctgctagactgtttgcttttacgcctgctacccagtaaacgttggctgattctataaaattcccgtcatccagtactaacatattattctcgtaattttttacttgttggttcaataatatttctactcccaaatgagtgaggtatttttttacttcttcggaagattggggggagaaggcggaaagcaagcgtggaccaccatctattaatatgattctcatcgtactggtgtctagatcgggataatcgtgcggaaggatgaatttacgcatttcggctagtgcccctgccagttcaataccagttgctcctgcgccgactataatgaaggtcatcagttgctcccgctttttggagtcattagtgttcaatgctttttcaaagctttcaagtacttggttacgattatgcaaggcttctgctgtggtcttgagggacatggtgcgtttagctatttcgttgttgccgaaataattggtatagcatccggtagatataatcagatagtcgtagcttagactgccgatggaagtggtgacttgttgttcttcaggatgtacttgttgtacttcacatatgcggatatgaaagtctttgtatcctttgaatatcttgcggaatgggaatgaaatagcactgggctcgatgcctgatgtggctacttggtaaagtaacggctggaaaagatggtagttgtttttatccaataacacaacttggtagtgttgtcttttcagtttgcgtgcaatctttaacccgccaaatcctcctccgacaatgactattctttttttatttcctttgtcgggaatgttggttatctgttcagtcataatggtatttgttattttatgtatataataacaaataactggggtgaaatgtttagtgtcatggctattagaaattaaaaattccgggggataatgtaggattgatataacttacgtctcgtgtttgcactagcctgccattcagagtgtagaataattgtttggtggccgacgaattgtttaggttaacagtaattacgtacagagtggttcgtttaggaaattctatgagatttacattggtggcagtccacatggcgtatggactcaatgtaaaatcattatatacattaggtgccagttgatctgtagtttgtaaattggtattagtcatcacccattgggcattaccgttcatccatacttttttttcaaaaccattttgagtaaaagaggctacataataattcccttgttggctccaacttacgttcatggcatgcggatatatctttttcagtgctatatgaaatgtagtgggagaggtagcagacaaggtggtgatcagtacccataatatcacacatatagaatagtatcttttcttcatggtcatttaaatgttttgatgaggttgataaaacagcttggttatactttttgttcgccggtataaaatctgattttgtggactttttccacacttttgtagtgttgtcaacaggtatctacacttctaaaaatggatatgtaaatatgtatatgcttgatttttaatgaagtattgagaaacgcagatttatggcacgtttcttgttttattgctatcggtaaaaatgaataaaaaacaaaataattatgaaaaaggtattagtaacattggtattagtaatgactttaggcgtgtctgtttcttttgctcaagcggctccggtagaggttccggtagtggaaaagcctcaacaatctaagaaattggttttttcagaaatctatatgaatgatttgccggaagctgtgatggacaggcttgcgctggaaggtgctatgataaagcaggcttttatgacctatggcattgatggaagccgtatttataaaattaatgttttaacaagtgatgctcatgaacagacattgttcttaggtgaagatggtaaaattttgaaatagttagtatatttataatagtgcttttacatgaattcccggcttgtgataagtcgggattttttttagttaaattgtttcttgacgatattcgaaaaataattaagaaatctcttgtacataataattgtagattttatctttgccactcgaatttaaaaaagatgataccatggaaacttatgatatatattttaaagaaggtactgattttgctaataaaggattttcattgaaggataaggctaaggctattagaatggctgaagatatgttggctgaacgcaaaggatatgtgaaggattttgttggaggaactatttccgtaatgtgtaaagaaacgaaagaggaagtttggtccaagccgatagaggaggtttaagacaacttttacacctctttttgcctagtcaatcacagagttgtcaaatacaacccttgattatatttatggtgagttcgttattggcggacataaatatttctttctcttctaggaatttccggtatatttctcccttcatgctttttgccgggctgatatggataatgtcaggtttcatccgattgagcgatgattcttttttataagatgcttcagtataatttttctttccattctgtacatttttgacatatagttgttattcattagctgaatacatcgtaaactcaccaatgaagtcttctgtataaacagaggttagttacataaatttatagtgattttttgtctataatatatttgccattgaagtcttgttagattcctttggttcttctctgtttccggtgcttgagtagcagatccattgaatgtttttccctttgtcctttgtgtaatatggcaaacataaaaggaaaaagaatttatgttgtttgaacaattaagttagaacgtgtgtttatgtaactattgtgattattgttgtgccgatggtgtacaggcattgatacaacaatgatttttcataaaaactttaaatttataaatttaggtagccctgacttgtgataagtcggggctatttgcttattatgtgctattaaacttggtcaactattggttaacaattttacgcaacagtaactctttgatgcaaaagtgataaataaaattttttgttcacatgaaaaaaactttctcaaaagctttgtagtattgattttctatgtatctttgcatcgttattatttcgcggggtattagctcatctggctagagcgttagactggcagtctaaaggtggcgagttcgagtctcgcatgctccactttacaaacctctctgtttcagaggggtttgtgctttcttaagcttctccagttttcgtttttggataaaaaaaagacagtttgtgccacttttggcaaaaagaacttgtctaaaacgaatccagaacaattatgacaactcttaaagctgccgttgttccggccaaggtgctgaaaaacggcaaacacagaattcgtatagcaattggtcataaacaggaaacaagatacatcgttacccgatttgaaatagataatactgctaattttaagggagggcaggtggtaggtgttcctgatgctgcacatgtcaatgctaaattacgtggaatacttaattcatatcaggatgccttggataaaataaacacatcatcctatacttgtacccaacttgtcgaatatttgtcctcggtaaagcagggagctatctcttatagtgttgcttcggctgactatatgcagaatttgattaaagaggggagaaggaccactgcttccttatatcaaagggcgagtgattacttcattgagtttgtcaaatatgatataatgcttgatggaattactccccggaccataaaggactttgacatttatctaaagaatgtccgaaggctggctcctgttacttgtggtatgcacatggcacatttgaaggcaataatcaatcaagcaataagggataaaaaagtatcatatgacacgcatccttttgaatattatgaaagaccggcaggaatgcctaaagagcgtgatatctcggtagctgacgtaaagaagataagggatgcggagataaaagagaagtctcagcgtgttgccagggatgtgttcatgctttcgtattatctaggaggtatcaatctgatggacttgatgcaatacaatttcaaagatgcgaaaattatggaatatgtacgtgaaaaatcaaaaaacacaaagaaaggtgatatgaagatcagcttcactattcctgaggaagcaaaaccgattatcaaaagatggatggggcgtaatggaaagcttgattttggttataaatactcttatcctaattttcgtaactatgtaacaaaagaaattataaggctaggggagaggctggagatagaatcgcatgtcgtatattattcagctcgtaaatcctttgtccaacatggttttgagctgggcataccattggaaactttggagtattgtataggccaaagcatgaaatccaacagaccgatctttaattatgtcagaattatgagaaaacatgctgatgaagccataagaaagattttagataatctaaagtgaggattcaagaactagagcgattgcttcggcagtcgcttcctctttttctttgtctatctctgagtttagccgttctatcaagtccatattccctgtgacaatcgtttttgtgccctcagaggaagaaattgtaagctcatagtgtccatagcctataaactttttagatagttgatgagtagttggggctaattttgacatatgcaattgcgttagtctgcggaaaaagaaaacggttccgctttcccgttgcgttacattccgtaatcgaaacagtgggtacattaatactccacacgggggtcggaaccgtattatgaagaagctacaggcaataaaaatcgtctgtagctcaatacgagacaacgcctcgattacttcaaaatgtaacgcaatgcaaagatgggtattttatatgactttacaaaaaaacaaaacgggaaaattcaagtaaagcataggggtgtgggccaacaataggattataaaagatgtgtcctaatcgttttctatttttatttctctttaaaaaagagtattatttcaccactcaatgcatctttaagtattgcttttgttatattctgtgcatcaagagttatgaatttctgttcatgtatttccctattaatatattttaccgatttaatttttacttttccccaattgcgagtattgacgtaagcctctttgaattcaaatattcgttctgtctgttgaatggactcatctgccaacttgtctaaagttgtgatgaccttccctttttcatcgaaaacgttattttctatagttcccaaaggaagatatttttctccccattcattgctacgttccaccagatgcgcactgaaatttctatatgatagccaatctatattatttgcttttgcccaatctgcatcaagtgaaaaaagctgctgggttaacgatatatttaaattaagccttgtttctgctattctacaatcatcgtctttacaaggagtccttaattcttttagattaattctatagtagtccgcatatttctttgcacctttctgatatcctacttttgttatcataataccagaaacatctgccaaatcagacaaaagtccataaaaatcccgaactttaccaataggaatctctttcttataatttttacattcaatagctactttgtgttgaatgccgtttatgctatattcccaatagacatcaatctgatgcttttgtcctgatttacctataagcttgacatcatgctttacactagtagtaataccacgagcattgattaactcctgatagacttcttgtgtaaacctttcatattcgatattttgattcataagattgtgacttttataataaatccaattcattcaataattccagcagacttcagtaggccgacaaatgggctttgccttctatcaatgtatggcttgacattcttagtattgatacattccatatcatggatttgcttaaatacggatataaattgattcctactgatagattcaccattcatagccctaacgctcccgtttttaccacctttgtattctataaaatcaaaagttgctattgcattgtatttaatgataccagtagaagagaaaaattgtttatttttatcaatataagctattactacattccagatttcattagctggcattttcttgtatttgtttttgattttcatgatagatattttttgcaaagttactacaaaaaagtgaaatgcggaaagatatagtgatagaattgagttacaagggttttggttgaagtggcgataatccgtgaagccattacaatccctgccgaagccaaatcctgacgccgctacgttacttgttcgtaaccatgcccgaaaatgcgacaaacgggtacgaatagcgaaacaaggctctaaggaatagtgagttatccataactcatgcgaaaaatcaggttacggaaaaagattgcgccgttcctccccgttttgcgtaccaacaccggactcttcaccaactaattttgaaacccaaaaattaaggacaatgaagagtacattttcagtaatctactacctcaagcgtcaggtagtgaaaaaggacgggacagttcccgtc

SEQ ID NO: 14415 - DNA, 82627 bp, Unknown
  gut microbiota DNA sequence
agccgctggaacttgtccaggcgacccaacagacttgaattctttctgtctttcatactttaattattaagttaaacaaaagttagaaagcagtttttttataggattattatattgataaacagtgagttatatttttcaacgactcatatattgaataaaaattaaatctatgttttctttttaatcacacatattctcaatctatattcttattaatcaagtatatataaattaatattctcatactattattattaatagcatattttatttcctttttgttgtattcaatatcgtgacttatctaattaatatcattcatataaacaatatatactacttacttctttgataaaaacttgctatggattttaaaatcatctataacagatgattgacgatagtttgacattacatcgattttttttaataactttaaagcataggaaagacgggaatgcgacccttaaaaatatttttatttttcaagtatgaatatacaaaatgacagcggaaataaaaaactaaaaactttatgatgactctttactatagttcttcttttaaaatagaatgtcctttataaaaataggaaggattttggcccaaactatgattcgacatgattgagaactaaaactcaatcatcagatttgtatacttaatcaacagatgcttgatgcttattgggaatttaaagagtgtataaatctataataaaaaaagaagaatattttccgtattaccatgttattgactgaacgtcttgacatattcccatatgtactttttaataataatgaaacctataagttcctgtattatcccaataatggcctttattagatgaatggtgcctacatcataaataataattataccaagaacttcagaccagagactattaaccttataaaagatgtgactttaaatgaaatactaatatatggatttctcaaattgcttttaattgaaagatccatatatcagtatttcatttccctagttttgtataatatttttcttgattggctaagcctttatcgtttttatcggtaaaacttctgcaaatgcaatgaagaatccaatgttttaaggaagcataaaatcttttaaagccattttacaatgtatttgttcttgaccggaaacggtttcagaattcaaatatacatcgataagatcgtcatcattcatgcctttatcttgaaatttataataaatttctccaggcatttcaagacttataaacgaagaaattgagttattactactttgtatactattattaaaatacaaatttagattcaacttattattagaaatatctatatctttttcgccatcatagtataataaaaagaaaactggcttatataaatcatactcaaaagttggaacaatattcatataaccattttttatatagaatgctccggccgttttatctaatgaataaatactcttattttttagatggatagagtcttggccggatatttgatactcttcacttaaagtgtcaacatgaactgtaaaagtaggaatctgttggctcattccattcgtactgtttaatataatatcataagtttttccatcctccaattgagttatattttcattttcctccaatagattaaaactaactatggcacgttgtacttcttttaaccaaggtatacgattaagactttcttctgttggaactaaaattgcaccaaaatccgtgtataacttgtagccacgaatattgtctccactaaccgtaacatatacaccattaaatttagaccattgcgcatcatcgtcattactgagacatgagcaaaatagcccgatacaaactacaaaaactacaaagaaaaagagaatataaaatctagattgtttcatgtcatttttataaattataatttaaaggtaaaagaggatgctttatacatattgatgcatcctcttattgtatatttattctattaccatcctgcgttctgagacaaattaggatttttcatacgttccgattgtggaattgggaagagatacattttatcattccaaacacgattgacaacgtttcgtttataagtgatagtaccatcctcattttttgtaagtttcatttctatgatgctctttaatttatcaccatctttccatcttctcagatcataaaaacgatgtccctcaaaagccaattctaccatgcgctcattctgatatttattccaaaaggcatctgccgacaaacctgttggaaattccggcattttgacatcagtacgattacgtatgatatttaccgcttcacaagctgtcatcccgaattcaccagcattatcagcagaacccgtatattggaatatggcttctgcatagtttaagtaaaattctcctaaacgataagtgatccatgaatggcggctggtttttgtagtactattggcactcagatcaatggctgaatccaaatattttttcaaataatatccggtaggagttgcacctgaaagaggttcagcattcaaacctccataaaaagtttcaataggattggtattctttgatggccattttgtatcgccattcttcacaatagtcatatcgaagcgtggatcacgtccgacatatggattagaagcgtcataaccacttcctgtttcattccacatttttccagtagctttcatttcataggcatcaaccatattttgtgttggacaattaccggaatttccacctggtactcccattggaaaattatattcttccaatgtgctgatgttaccattatatcgacgaacaaaaatcatttcattatttgaccagttgttaggtccccacaattctgagtacttacttaatttaaaaccgttagccgtacaagtttcaatcacttctttattagcttcagctgctctgcgccacaaatctttgttattttccggattaaacaatggactggcagcatataaagcagcacgtgcttttaatgccaaagccgcataacaagtaacacgaccgttctctgctggggcaattccgtccagtccaagttttgtgtagtctgcaggtaattcagtagataatttgtcacattctgctataatggcattaaaaatttcctgtgcaggggtgcgtgttagactgtttacttgatccgtagttaccatttctgtaaaatatggaacatccccataagcacgtactaaattaaagtaaaaatatgcacgcaaaaaacgagcttccttgaaactgttggtataacggaacatttgtgcacgatagtcatcatttaattttaattcatcaaatgtcaatccttgaaattcagccagatactgattacatatctgaattgctttatagctgctagtccagatattagacattggattagccggactccaagatccgtttacaaaatcacatatatcattgtttgtataggcatattcagcttcatcacaagcggatgccagcattccacctttatatgtttgaccaaagtcatagtctaatatggaataaacattggtaatcataccaattacattttcataactttcatctatatagtcttttccgtaattggcatattcgtgataatccaggttacatgcagccaaagttaccatacatgccattccgctcactatttttttgattttcataatcatgtttttaatttaagttcaacaattaaaagccgatagttaatccagccactacactacgagttaaaggataagtcgctccataaacttcgggatcggcaatattaatcttatcaaaacacaaaaggtcaatacctctcacataaatctttgcattgcttaatattttgctttttttcacccatgtttgtggaaacttgtaatacaactctattgaacgaagtttcaaaaatgagcggtctgccaaccacaaggtattggtctgataattgttctcattactttgagagctcaaacgaggatatttagcgtcttgattttccggagtccaccggttatcataatattcctgtgaaatcgttgtattatttattaatggccagtataaactcttcgtatttaatacagcagaatatcttcctgttccttggaacatagcatcaaagcctaatcctttccattccgcgcccaaattgaatgaatagtaaatttcaggagcagtcgtactataccctatagcaactttatcattcgcatcaatgatattgtcaccattgacatccttatattttatatcaccaggttttacatcaccaaatgactgcttaggactattctcaatgtcagcttgatctttaaaatatccgataacttccataccataagtttgcttcagagggttacctgtagttataagattgtcatacatacgcggttcttccatttgctcgataatctcatttttggctaaagcaaaattagctcctatatttaaagtaatgtcagcaatttttttgtggtaattagcaccaatttcaactccccaactatctacaatgccaccattttcataaggagcagtaaatcctaagacacttgaataatggccgcttgaagacacccaaatatctgaacgtctttcataataagcatcaaaagatacatccaacccattgaacatactggcatctaaaccgaaattatatttatatgctttttcatgagtagaattcaaagaagccagacgacctaatgaccaactttgcgttcctacagaataatttgtgtcaaatggataataaccaccgccaccatatgtttgttcccaatagttagtaacctcgttgtcatcatccaacggaagacggtcggtattaatgacgcccaacgaagctcgcagttttataaaattaatccaagaaagatcttttatgaaattttcttttgacatgacccaagctaaaccaatagtgggagatatagaccattgatgtcctggtgccaatttattagacgctgaagcaactacactcaaatcagcaaaatatttatctttgtatccataatgagtatagaaagaggcattctgacgataccaagtctgatcagtccctttggtattacggtattcatagtcccattttaattgactataaatcttattgtctttatttatttgtttgtcataaaataaagttgctgcaaaattgaatactcgtgtaaatgcaatacatttagcatcactactcatcgcactttctttaccatcagtataataagtcgtacttgagggtacgccattttcccatgcagttaccgaattactaccataaacaaaagttttagaatgattttcccaatattgggcatagttatcataagataacataccgcttgctcctagtcctggggttatagatgataaatcttgggtaagagtcatatcagcgaacaatgtacgttcgtggaactttgtgtaagccgccgcttgtgatacagctaaaggatttttggttccagcccaagtcgcactacctccccatgtaccattttccaaacaagcgggaaaagcagcggaaggtaaagtataaatcatatcccataaattagcacctccctgatcgtccgctcccggagtcctagtttctgacaggatacctaatacatttaatttcaattttgttttttctgttagatcaatatccagattagtacgtaaattggctctggagtattggtcctgtgtagaatatccatcattcatataaggattggcaataaatcctttattagtagtcaagttagccatggcataataacggaatttgcttgccccacctcggaaacttatattatatatattggtggcatccatatcacgataagtttctccaagccaatccacattagcataaagatatggatattgaccactacgaaatgcgttcagctcatcttgtgtataacgtgttgttaacccgtcatttaccaatgcttcattcatggcatttgcataagaataactgtctacaaacttgggtttgcgtgcctgccaaccgaaaccatgatcataagtaaacttgatttcacgtgtattataaataccacgtttggtagtgatattaactacaccattaatacctttatgtccgtaaatagctactgcagcagcatctttcaatatagtgacagtttctacctcttcaggagtaacatctgtaatatcacgttcaataccatccaccaatatcaacggattattggtagataaactttgtagaccacgaataaaaaatgtaggttcagcatctgcatatcgtccgctaccttgtaaagtagtcaagcctgtaccatatccaaaaagcgaattagctatatttttagcactacgcttattgaaatcttcattatatacggtagagattgatgaggtagattcttccagacgttgagctttatgatatccgatttctacaacttcatcggaatattttgccggtttaccggaagttatactatcattgagttcctgtgcatacccctgcatactcaaaaaagtaaggagtgccggaataattaatctattttttctcataataattaattcaaattgtaattgaagtattcattagttattaccatccgggattttgaacaagcccgtatcctttattaacttctgttgacggaaatggagaaagataccatttagggtcaaatccatttgtccaccaataacgagtagggttattcaattcaaatttttcatattcaaaatgggttggataagccatcttcccttcatcgtttccacgccaaggcaaatctcttcgtactccgttgtcatctaaacgataaatgaaaagtccatgcaattgcttttcaaatacatctgctcgtttatagcgaatcaagtcaaagaagcgtgcatcttccatacctagttcgcaagcacgttcacgaagaagttcttcaataaaagcatctttattactttgtaaatttttatctggattacattctgccaatcctttcattcctacacgtgcgcgtacaatatctacttgagctatagctttatccatactgcctcgtgaactttgacacaatgcttccgcataaattaaatgcagttcagctatacggatacaaggccaatgtacatatctacgcaacatatcgtttcccattaagaatttgatgggtgcatatcccgtagcgaatgaacctgtttgactggtaggaccattgccggcactctttccgcccaaccacgattcaaagcaataccccgacatatttcctgtagtccaatccaaagattcttgctgaccatttacaatgatttcttcatacatacgcgggtcacgggtcaattctatatttattagtccgtcactggctgtgcccgttcctttcaaaaacatttcatccagttttccttcacttttagtcttatcccaatcaaacggcataccatctttccaaggaaacatttccatatattcttgtgtaggactgtaaccacgatgaatgctcataagaggatctccccattggtgccaattataatgacttgatttgaatgcatcaatatcaattacacgtgtgtttatcaatacttccgggctgtccaaattagcatagcctgcacgatatgccaaacgataatcttctggacgagtacctttcgcccgctgtaaactatatccacctttagaagccagttcattaaagaattgttcacacgcttccagacagcgatcccatagttccggtttataaccaccataccaaatagcaggattgcctgtcgctcccgggtaataaggctggtcggaattaaataaaggtgaggctgcaaattgaagaatacgacatttataagctaaagctgctgctctagtccagcgtccggattcagatgcaggtgtttctacagtccaaggaagtacagcagcagcttcatccagcaattgtaccatataattcactgtttcttccacactgttacggggcatttcatagcttgtatctgtcccactgaatgtacctttaattaaaggaatgccaccataatgacgaaatacatcaaaataacgggaggcaagaatacatttcgcttgtgccaccatagaaactttttcatcttcccctaaccccggtacattatcaatattctcaatcaacatccatactccacgtacagcttcccagatattattccttaaataatcaaatttatcagaacgtttaccataattagctgtatgagtaccttgataataaggtccggtgataccggctgatggataagtatatatataaagatctgtcaatgcctccggtttgcccacgtaattattagaactttcctgattagctacatttttataaggaagcccataatattgcataccataaagattagtcagaaactgtctggtatattcagcattgttaaatacggtatcttttgtaaccgatcctcctggagccttttccaaaaaagagttgccgaacttgatttcatcgacacatgaagtagcgatgacagatgttagagccagtcctgaagcaacattaaaaatccatttattatattttttcatttgattgcattattaagattaaaaaccaagtttcaaactcaatgaatatgtttttgtcagcggataagagggagaattgctagcctttgattccggatcactccaaaaatatggagtaaaggtcaataaattatatccacttaacgctaactgcatagtattcagtttcagttttttcataaacggaagattgaaattataagcaatttgcagatttttcaaacgaagatacttagcatctttctcccacaaagttgattccgcatagttattggtatcgttgataaatgtcgcacgcggatattccgcatttggattcggattctctggagtccatgtatggtctaacatatattccaacaaacctccttgatctgagtttgtacggtctgtaaaaggttggcggaatacgcttgatatactgcggcttacattccatgcggcagtccattgcattgaaacatcaaatcccttccagctgaatcccatattaagaccggccatgtattccggatcatctgtgaaaccaaattgacgtgacatatcgttagaatctattttaccatcgttatttaaatcgacatatacacaatcaccattttttaaatcactgactaattgttctggcatatccgtaccatatacttctttgtaatgagtaggggttgtttccgaattataatattcaaagaatttatattggctgcgtgaaccaagacgacgtcctttttgatacatatattcttcattctgcggagcttcttttctctctaccacccgattttgattgtacatcaaattcaatcctacgttatatctaaaattgtcgcctatttgatcgttccattttaaagtgatttcccagccccagcttctcatttccccaagattagccaatggaggagtaaatcctaatacagaaggagccgtaccgtcactcaacataatgtctgtacgtttttcatgataataatcaaatgaagtgcgtaagcgatcattaaggaaattagcatctacacctaaattggttttcaacgctttttcccatgtaatatcttggttattctttccattttcataagctgcaggacttactgtggaattattgataccaaacaaaaaaccatgaccatcatggttaattaaagaagaattattaactacataaggatcagacatatagaggaaacgttgcttgtttccgtcaaaactatcattaccaactagaccgattgtataacgaaatttcaagaaacttactactgattttataggtttccagaatttttcctcactaacaatccaaccaaaagacccggccggaaaagtaccaaaacgtttgccgggtgcataattctcggaaccattatatccaatattgaattctgccatatagcggtttttccaatcataagttgcacgtcccactataccaaccataccacgaggaatatcagaatatgcactaggataatatatcttagactgattgtataacaatagtgctgaaacatgatgattaccgaattcccgggcatagtttaaggctgcctccatataccaatcacgtgatttagccggatccttatcttcatatttcaactgagaattttgtccatatttcttgtaagcaatcgtaccatcttcctgtaatacaggagtataagttgcaacactagcactagcctgtgtataagatgtaaagccactattgtatgatcctttaatatggaatgacaatcctttagttataaaatccagtttttgttttaattggacatcagcatttaaggtgttattactggttcgcataaaacctccaccatagtatcccatgccgctaccaccagtaaaaggcattctcaaatccggatagtccgtacttgcattaaccagtttgccatcgacaagtcccggactagaaaacggagtggaataatacatgtttattaacatcccggcactaccctgtccagtataaggtttagaagcattattcacattaccagcaatattcattgataatgttgtcgttttggttacgtcaatatctagatttgagcggtaattgaaacgattatattgataagacagattatagggcaagtcaaattctttaaataaaccaccttgtgtataagctcctgctgaaataaaataacgtacacggtctgtaccacctgatatattaacattatgctgtgtttgaagggtcatatcttttaagcaataatctacccaatccacacttggaaaacgaacgggatctgaaccatctttaaatttctggattatttcatccgaaaacgtaggattcaaaccatcaccagtgtttatttggttataaaaagtggcatattgataagaattagccattttaatactttcggtcggggcaataatacttgaggaagtcgtaaatgaaatcttagcctttccttccttacctcgtttagtcgtaattaaaacaacgccatttgcacctcgtacaccaaaaacagccgtagcagaagcatcttttaatatagaaatgctttctatttcattaggatcaatatcattcatgctacgttccacaccgtctacttgaataagaggagcagattgattccatgtagcttgaccacggacaaaaatattcgctgcatcacttcccggttctccggaatactgtacggtagtcaaacctgccatttgccctgataacatattagaaatggaccctgttggagtttttgtcaattcttcaccttttacgctggaaatagctccagtcacagaaacctttttctgaacaccataagctacaacctctacttctcctaacatttgagaatcatcctccaaaacaatttcgatattagattgttttacttccacagttttagaactatatccaatgaatgaaatcaataacttagctcctttaggaacatccagtttaaaaactccatcaatgtcggttatagtacctactgtctgaccttgcacaacaacattggcaccaataataggttctcctaaattatctacaaccttaccggtcactgatactttttgttgttgagcaatattgtttgcagctattgccgactgtcctcctaggggaagagccagaggacctgcaaacagactaaagagaaaaagccatcgaaatcttaatcgatgtcccaacagacttgattttttgctgtctttcatactttaattattaagttaaacaaaagttagttttctattctctcaggagaaataggtctcccacctgtgaaaaagtgttgcaaatatatgcgtgaatatgaaaaaagccaatgtaggattgtacaaaagcatggaaatttacgtcttttcaactgaaaaatagtacaaatgtctgtgaacaatctcaaaatggatagtctcacgagcatttttgttatacaagagtgcttttatttctgattgttactttaatattgtattgtaaaacgtataaactaaaatttgaatatggctaatctttcaatagtaattgtgcctgctaaaaaattatctaacggtagacatagagttaggatcgcagtagctcatcgttcacaaacgagatatatttcaacccaattcattttggattctgcaaatcaaatgaaaaatggacgagtagtaaaacacgaaaatgcagctaatataaattcttgtttgcgcaaactgattaatgaatacgaagagattctttcgtctattcattatcagtcgaccatttcatgcactgaattaatacatgtcataactcgggaacaacaaaaaaagggaataacctttaatacggtagtgaaagaatatctttcgatgatggaggcagacgatcgtaaaaaatcccataaattatataatatagcttgtgcaaagttccttaaacacatgaaaggtgattttcctttggtacaactcagtccgacacatatacaaagtttcgctgatgtaatgaaggctgaaggattaaaagaaacttctatcaggatttacctcactttaataaaagtaatattgaactatgccaggaaaatgaattatgtaacttatttagttcatccttttgtcttatttaaaatgccaattagtaatatcagagaactagatctgtccgttgatgaattaaaaagaatacgtgatgtaaaattattcaaatctgtgcatatcatggctcgggatatatttatgttaacttattatttaggtggtattaatctaagagacttaatggagtatgatttcactaaagggaactgtatgagatatataagacataaaacccgtaatagcaaaaagaatgaaaatgaaatagctttcactatccagccagaagcacaggcaattattgatcgatatatttcagaaaatgggaaattagtttttggcaagtataaatcttatgaaaaagtatatagtttggtctttagacatatagggaaagtggctggtctagcaggcataaatagaaaggtttcatattattctgcaagaaaaacatttgcacaacatggttatgatataggtatcgaaatagaaaaaatagaatattgtattggccatagcatgaaaaacaatcgtcctatatttaattatatacgaataatgcaggagcatgccgataaggtttttagagaaatcttcgatcaattgcttaaatagccaattctattattatatatgcataaatgctttttcatttcatgtaaatgttattattgtattaccttaaaaagcaagtatgcttcgtgagccaagtaaatgtacttaaatggctaatgaagtacacttactttttaaggatatcttttaagtttatgctaggacataaactgcttcatataaattggaacgtaaagcaaaatatttcataaaaaccaactaaaagagatttttttcaaacagcaataagagctctttatattctctattattgtatcatctatattacaaaattcgatgaaatgggcttttttcgatacttctatacttatatatcaagttaacttttgtttaacttaataattaaagtatgaaagacagaaagaattcaagtctgttgggtcgcctggacaagttccagcggctgttcttcgttgctttgttatccgtattggctgtaggggcctttgcacagagcaaaaccgtttcgggtactgtccttgacaagacaggtgagtctgtaatcggtgccagtgtggtggtgaaaggtactaccaatggtacaattactgactttgatggtaagttcacacttcaaaatgttcctgataatggaactatccaagtaagtttcgtgggatacaagaccgtagatatccaggtgaaaggacaatctaccgttaaggtaatcttggaggaggatactgaaacactggatgaggttgtggtagtaggttatggtgttgttaaaaagagtgatgttacaggagcgttgacaaaagtttcagagaagcaaataaaagagcgtccagtgcaaaatgctttgcaggctatgcaaggtaaagctcctggtgtggatattacaacaaatagccgaccaggtgaattgggagatgttcgaattcgtggtaatcgttctattactgctgataatgatccgttatatgttattgatggaatacctatggttgccggttctattgctgatataaatccgaatgatgttgagtcgatggaaattttaaaagatgcttcagctaccgccatctatggttcacgtggagcgaatggtgttgttttgataacaactaaaaaaggtaaagttggtaaggttagtattaattatgatggaacagtaactttttctaaaatccattcgatgacagattggatggattctggcgaattaatcgattggaaacgtcaagcttatattaatacaggagcatattcaggtacatatggtaatgctcctgatcctaatattgatggtgatttattgttttctgacaatggtggaggtgtatctaattatccgtatttgaatcaatattttcagaaagcatgggaatataatgcggatggttcatataagatgcgtccggctacagattatgaaaaagaggttttaggatatgctgatcaagtacctgtatataattctgcaaatattccaactacaccttggactgattatgtgacacgtactgcgattactcataatcatcagatttcgttgtcagctggttctgaaaaatctaatttgtacatttcattggcttatttggatcaagagtctccgatgaaagatcaagattttaagcgttatacggcaaatattaatggtgaaattcaagctacaaattttttaaaggtaggtatgggtatgaatgccagtcattctattaagaattatggtattattaataatacttctaattcaacctacaaagattcttatggctatgctgtggctaaaatgccattcgcccctgcttatgatgaggagggcaaaccattgaatgtagatggaggtccgtcacagtataatccgatgttggatgtatatcaggcaacgaatgaaactcgttattatagtgttatgtttaattcttatggagaaattgattttggtaaaatatggtcgccggttgaagggttaaaatggcgcacaaatttaggtactcagtatcgcaactcacgttatggaagctattatggaaatgatttttctaatcctttgaagcattctgcttatgctgctaatacagcctttaatcagcaaggtcaaaatttgtcgtggacattagaaaatctaatttattacaataaaatattcaagaatatccattctgtgggattaacattgatgcagtctgctgagtattctcgtgctgagggattggaagtacgtgcatataattgtacatttcctacggcattatggtatagtgtgggtaattccgatttgacaatggatagcccaggatcttcatttagcgaacaaaagcgtgcttcttatatggctcgtatgaattatggattgatggataaatatttgttgactgttactggtcgatgggatggtgcatctatgttggctgttggtaataaatgggattttttcccttctgctgcattggcatggaagatgaatgaggaaaactttatgaaagacgttaaatggatcaatcaattgaaggttcgtgttggatacggtgtgacaggtaatgcatctataaaaccgtatcagacttctggaacaatgacagcaagtggtgccggtaagttttttggggtaggtaatattactcaagttactattggtgctaaagcttctgtattacctaatttggatttaggttgggaaaagacagcgtctaccaatattggtgttgattttggctttcttaacaaccgtataagcggtagtgtggaatattatgtggctaaaacttcggatttgctgcttgctaaatcattacctttgatgactggttatacaagtattactactaatattggtaaaacacagaacaaaggacttgaaataacattgtctacaactaatattcaaacaaaagattttacatggaagactgattttacattctctactaataaagaagaaattgtggaattggcaggaggaaaggttgatgatacagcaaataaatggtttataggtaaacctaaagatgaaatttggactttgaaatatgatcgtttatggcagaatactcctgaagatttaagaactttggaattatatgagaaaatatcgaagactgtaatgcagcctggaatggcgaaagttgtagaccaaccattaatagaagttcccgagggtacggaaggagcaaaaactgtaacattgaattctggcgaaagagtgacttatatggataatggttttggtactatcaatacagaagataataaatttcttgggtcattccaacctaaatggattggtggctttactactacatttatctataaaaactggcagttgaattcatttgtttatgctcgtatgggcaatatgtattatggattgttacaaacttatggtcgtcgtgtagaaaaggacgtatggagtactgaaaatccgaatggaaagtttccacaacctcgttctggtggtgtaactactacagattatagtgcttatatgaactatactaaaggtaatatggtagcaatacgtaatattgctttatcatatacgttccctgaaaagtggttgaagaaacttggggctgctagttgtcaaatttatggtcaagtattgaatccatttatatttggaggagaattagtgaaatcgggtataaacccagatgatacaacaggatggagtgaaaaaacaaatgacactaattttattggtggtcaaacaaacaataccatattgactcgtagttatgttatcggattaagacttggattttgataaaccattaaaagatattgaatatgaaactaaaaaaatatatgttgatttccatggttgctgttactttagcatcttgtggagatgattttttggaagaaaaaatggtagcaaccattacgcaagattattttgaaacagaaacgggggtagagcagttaattgttagcacttatgatgcgttacgagtgactaaacagtaccaacaaggaccttttgctttttttacgggtgttgataatatgatggctaaatctgccaattatgctatttattcaggatcagtttggacttctactggtaatgaagcaacgtatgttgatggattatgtggtgagtatactagtaatcaattgttgggtttttatccttgtattaataattgtaatcgtgcaattctttctattcgtgaggggaaagttgatggtaaatttgcttctgatcaagcttatgcagaacaacgaatggctgaagcaatgtttaatcgttcctattgtatttatttgatgaatacgttattgggagatgtttatgttccaagggggtatactactgctttacctgaaaattatgcatacaatcgggaaacttcggaaagtctttataaattgatgattggagatttgcgttatgcttttgaaaaattgccgaaagcttccgaacaatcaggggctgattacggacgtgctacaaaaggagccgccgctcattttttggcaaagctttatttgcaacgtgcacaaggggctgattatggaacagcagaatacggacgtaaggcggatggaagtattgataattctaatgagaagtcatatttgggtatgctatacaaaggaaaaggcactgctgacttagattcttgtatttattatgctaattatgtgattgatcaagatggacactattcattggaatcggattacggaaaattgtttagccatcctttggatgattattcaaatgaggagagtcgtgagataattttagcttgtgtatatggtatgcctgctaatagtggtacaaatggacgttatgggaatcgtttgccttattttttaactcccaattatacaagtgcctcgtggggaattcctaattttacttgggaatatccaggtaaaggtaatgggcattctgtttcgcctactgattttggctacgatgtttttactaacaaacaagctgattctcgttttcaaaaatcattttatttggaatatcatacatcattaaggggtggttctaatacatcgactccggcagcagatgttccttattacgcttatgatagtgaagataatgctacatatacctggacatcagatatggctgatttttttaattctaatatattgcctaattataatcgtgattcgtggggtggtcgtcgagctgtcgcaggagagcataagatgggggcaggtgatatggcgtttgcttatttggaaaatacaaaggaaacagctattgatattaaagaagcgttagcacaaccttttgtattattggcacgttggattaaagatggaaataaatattattatcgtgctccaataaagtcggatggcagttcgtatgcttataataatgcaacatatgtagggttggataaagtttcgggaacaggagggccgactactgctaaatacactgatcctaatagaaattcttatgattcatactattcatcgcgcgacattcctttgttccggttagctgaaacattcttaatacgtgcagaggcttatggacgtaaaggtaatttctcggctgctgtcttggatatcaataaagtacgtgcacgtgctgcatttaaagctggtgaaactcgaaatgaagtgttggctcgtttgtatccgggtagtgagaatttggctaaaacagagagagaatggccttatattgtaaatacagatatgacttcttccatgttggttgatgaaagttattggacaggtggggtaaatgctgatgctgagaattatcctgttactgctacctctatattagatcgttttgtcaattttatattgaatgaagttgcacgtgaagcgaatacagaatttatttattatgaatggttgcatcattctggttggcaggctgatcgtataatgtatcatgatcaggtaggttcaccattaactgggctttgggatagtgctgataatttggtgaatgggacaggacctacaggtaatggtttgggagcatttaaacctgcttatacattaaaaccatttagacagtcattgcttgatttattgactgacgaaaatggggctttactggatgcctctgctaaaaaagcttatcaaaattatggttattaattagttgaatctaaccatagcaaaattgcctgtcattactattaatgatgggcaatttttaaaacatttacaatgatttcgtgaatctttttaagatcataagatttgggaagtgattgtagatgttttgttttgagataacgtattaaatgtgtgaaggtactgattatacaaaaatacatgtataatggataaaattctattggatgccatgcgattgattcttatctttgtgtggtaaatagtatattggaaaaatgataaaaataataatttttttactgttatatgtgcccctagagagcatagcagctgatgatgaagaggtaaaagtgagtattgcccaatataggggaggaagagatgctgcaatcagttatacttttgatgatggtttgttggaacaatatacattggtttttccggaattggagaaaaggaatataaaggctacattcgctgtgaatggaggttggatggggtgtattagtgcaaagaaagtatgtatgtcttgggaacaagcaagggaaatggcacaagcaggacatgagataacaaatcatgggtggatgcataagaatctgacgaaattggtaggggaagaaaggcgttttgaaatacaacataatgatacggttatttttgagcaaacaggtatatttccgcgtacttatttttatccgggaaaccggaaaaatgaggaggccatagcttgtgcatcggttgacagagtaggtactcgtatccgacaaatagatataggttcacgccgtaatgcccggtggctaacgcagtggacggatagtttgatagcaaacagattgtggggtgtcggtatgacacatggtatagtaacgggatatgatgcttttcctgatcctcaagtgttttggaatcacttggatgaagtgaactgccgaagagacagattgtgggttacgacatttcgtgaggtagcggcgtacatggctgaacgggagaatttggtactggatataaagaggacatcaggaaaaattacagtgacttttcattttacaatggacaaggaattgtttgacatgccgttgactttgcttttggaagatttgcccgatcagtgtgctgttactgttctgcaggatggtagaaatttgcctgtgaacttgtgtcgtagaggaatggttgtggacttcagtccgtggggaggaccagtagagatctcttatgcttcttcaataactaaaatcagataaagtgaacaattaaccatataaatggataaaattctatttgatataacttctctcgtgcataaatttgtcgtatcagataaaaaatgacatgctatgagaaagacatttttagctattacattatttttagcttttagtaaagccgcattggctcagtttggaaactgcactgcatcggaaatgcggacttatgtagatagtgcgaccggcaatactatcactatgttgaccgatacgatgaagaatgaccgttttctttatcagactgatcccatgtggacagctgatggcaaatatttattgttcaggtcttccagccgtggaaatgacaaagaggtagaaagtacgcttcctaacggagaaaaacgtaaatggactcctacacaaatttattttattgaaatggccaccggtaagattattcaagctacggaaggaccgaacttgggcagtgcttttttggctaataaaacgaatcgtatgtttgtcagccggaaagaaaaagaaaactggaacatgtatgtgatggacttggataaattctttgccgatgtaaaacaaggaaaagtaggtaaaccatccgcttatgaaactttcataggcacttttcccactgagatgggacgtccgggaggatatgctgtggattgcaatgatgattatgcctacataactgttgagcgtgagggtacggaagaggaaaaggaacgtatgatgaaaaacgctttcttgcctgaaagtaaccagccggtaaagataaagccaactctttgcggaattcgtaaaatgaatctcagtacaggagaagtaactaaggttattgatacggaatttaaaacaggccacatacaagccagccgttttactccgggtgaaattgttttttgtaacgaaaccggtggcgatgcccatcagcgtatgtggttttgcacggcagatggaacagtctttaaacctttatataaagaaactccgctagattgggtgactcatgaaacttttgcaaccaaagattttgtatatttcaatgtcttaggatttcagccgcgccttcgcaaacaggcaagtggtattgtgcgtattaatttgcgtacggatgatgtagagttgatagggcaggtagaattagaaaaagaccgccaagcgattgatggccaattggtaggaagaggtttctggcattgtaatgctagccgtgataataaatgggctgccggagatacttttggaggtaatgtatggctgattaatgtgcaaaccggagaacgtcattggttggtttcggataccaagatgaaaccggatcatgcacatcccagctttagtccggatggtacgaaagttcttttccaatccggacattttacaaatggaaaaagattaaatttaatgatggtggatatttcatcttttaaataaagcaaggttggatatgaaaaaaacacgtaagatattattttccgcagctttgttgtcttcagggcttacgatggcccagactacaacggcagagaaatcgcccaatgttatttatattatggcggatgatttgggaataggtgatttgggatgctatggtcagcgtcagattaagacaccgaatattgatgggatagctcagaatgggatgaagtttatgcagcattattccggttctacggtcagtgctccgtctcgttgtgctctgattacaggaaagcacatgggacatgccgcaatcagaggcaatgcaaaagtggcaggttcggatggattgttatatgaaactccgcttcctgccggtgaagttactgtagccgatatttttaaaacaaagaattatgttaccggatgtgtaggcaaatggggaatgggaggaccgggtacggaaggtatgcccggcaaacatggttttgattatttctacggttatctggggcaacgttttgctcatagttattaccctgagttcttgcatgagaatgagcagaaaattatgctggatgggaaatattattcgcatgacttgatgttggaaaaggctttgaattttattgatgaaaatgcgcagaaacctttctttctttatttttcaccaaccatacctcatgcagatcttgatataatgggagaggtaatgacggaatatgagggggaattttgtgaaactccttttggaggaagcaaagacggttataaatcgcagcaaactccgcgtgcggcatatgcggcgatggttacttatttggataaaagtgtgggtttgattattaaagaattaaaagagaaaggtttgtatgatcatacgataattgtttttacttccgataatggagtccattcggagggagggcacgatccatcttattttgacagtaatggtccgttcaggggtcagaaaagagatttatatgaaggaggtatccgtactccgttcgtcattcaatggccgggagttattccacaaggggtagttactaatcatatttctgcattttgggattttttgcctactataggtgaattggtgcaggcggatattcctcaaaatattgatggtatatcttatttgcctactcttacgggaaaaggtattcagaaggagcatgattgtatttattatgagttctttgaatttggaggaaagcaatctattatgacacctgatggttggaagttggtgagactggaagttagtgacccgtctaaaacttatgaagaattgtataatatttatacagatccggcagaaactactaatgtgataaagcaatatcctgatgtggcaaggaaattaaagaatatgataggtggtcaacgtgttgaaaatgcccgtttccatttttaaacaagtaagatttatgaagcaatccttatttttaaagaaatgcagtaagttctgttatgtactttttgcagtttgtggctgtttggcttgtacacagaatcagaagattgaatggccgcaagtgactaacgagaccaagccttggacgcgatggtggtgggaaggcaatgcggtcaggactactgatttggatacggttatgcgtaagtaccaggaggcaaatctggggggattggagatcactcctatttatggaatacatggttatgaggaccgctttaaagattttctttctccggaatgggttgatttgtttctgtatactttgcaggaagcaaagcagttggggttaggtattgatctggctaatgcttcgggatggccgtttggaggaccttgggtcactcccgaagatgcgtgcaagacggtggcttataaaacttatcaattgaaagaaggtgaacaattgggtgaacctgtccggtataaagaagaaggctttgtcagattggcggggcatactccggtaagactggcggatttgaaagaaccagtcagtgcgaatgctgatttacagacattggcattggatcaggtacgatataaaaaggaactgcctttgattatagtaaccgctaatagtgataaaggtgaatgtctcgacttgacttcaaaaataaagccggatggtacattggactggacggctcctcaaggtgactggactatttgtgctctgttccaaggtcatcatgggaaaatggtagaacgtgcagggcctggtggtgaaggtgatgtgatagatcatttttcagcttcggccattgatcattatctcagtaaattcgatgaggcttttaaaggaaaggatatcagttatctgaggtattattttaatgactcttatgaagtggacgatgcaagaggcgagtcgaattggactcctgctttttttgaagaatttcagaagtatagaggatatgacttgcgtcaacacttacctgcattgttaggtattgacacaccagataaaaatgcaagagtgttatatgattatagacaaaccataaacgatttattgataaatcattattctattcgttggcaacattgggcggcaaaacaaggaaagggtataaggaatcaggctcatggctctcctgccaatattctggatttgtatgcagtaagtgatgtgcccgaaatagaggggcgtgatttagtcagtataaaagcagctccgtctgtagctcatacggaaggaaagaaactctcatcttcagaaagtgcgacttggttgaatgaacattttcaatcgaatctgggagatgtaaagaaagcgcttgatcttttctttttggggggtgtgaatcatattttttatcatggtacttgttttagtccacaggatgctccttggccgggatggttattttatgcggcagtccattttcatccgaataatccgttttgggaggattttaaatatttgaatcagtatgttactcgcgtgcagtcatttttacaggatggcactcctgacaatgatgttcttttatactataacatagccgatgtgatgtctgagcaagggaacagaagccttcaacactttagcggattggatcgtaatatgttggaatcttcggtcagagaaagtgcggtaactttaacagagaatggttatgcatgggatatgatttctgacaagcaacttcttaaaactaatattgagaaagaaatgattgtaacgcctggtgccgcatataaaaccgttcttgtttcggcagcgcaatatattccttatgaaacaatggaaaaactgatggctttggctgatgaaggtgctaccgttgtgttttataagggaattcctcaagatatggccggaatgattctttcggaagaaaaacaggctcattttaaagaaatgttggatgctttggactttcatgctgaaggtgctgttaaatgtgctcgtgtaggtaaggggaaggtttgtttgtcagatgatattaatgctctgatgaatgaggcgaatgtgggtgctgagaaaatgtatcaggcaggtctgcaatgtatccgaagaaatagtacgacgggaaaatattactttatagaaaatagtagtgaccgtaaaatagaggattggattccacttcgtacagaagctcggagtgcggcgattttcaatccaatgactggtgctagtggtttggctactatgaaacgcaatgacgggcaaacagatgtttacctggaattgaatccgggtgaaactgtcattgtatcaacttccggtcagcattttacaggagatgcctatgcttattatcaaaatgcaggtgagccaaatccagtttccggcagttggactgtttcttttgttcaaggaggtcctcaacttcctgcttctataacggttgacagtttgggctcatggactgattttgtaggggatgaatataaagctttttctggaacagccgtttatacgactactataaataaggtgcctgtagcggatgtgatcaaattgaaccttggaactgtggcagaaaatgcatctgtctatttgaatggagaatatataggtacagtgattgactctccttatcaattgtatatccctgctgaaaaattcaaaggacaggatgagttagttgtcagagtagccaactctatggcgaatcgaattgcttatatggataagaagggagtggactggaagattttctataatgtaaatatgtctgcaagaaaaaaggaaaatgtgaaaaatggtatctttgatgcttctgattgggaaccaaaatcttcagggctattgggacctgtaacgttgactccggctatggtgaagcaatgaattatatagtcctgatgttgcaacctatagaataaatgtttcagggtatttgtgtaatatattgagtattaatgtgatatgtaaatatgtgcaacatgaataccctgaaatttcgttttgaacgaatttctatataaatgtatcttattctatggtatgagagggaactttatgctagttttgtaacaaacaatttgagataactatgagaaacaaaattcttttatttttattggcttttataggaataagtcagattgcggcagcatcagctgttcgtgataaatacaattttaattctgaatggttactttatgttggcgatataccggaagccaaagaagtacgttttcaggatacggattggaagaaagtaacattaccccgtccttttaatgaagatgaagcttttcgtttaagtatagaacaactgacggatacaatcatgtggtatcgtaagcatttccgtctgcctgccaatagcaaaaacaaaaaagtttttgttgaatttgaaggcgtccgtcaaggagctgatttttatatcaatggtgaatatatcggcttgcatgaaaatggtgcgatggctgtaggtttcgatttgactccttatattaaatatggacaagagaatgtaatggcagtccgcattgataataactggaattataaggaacgtgccactgatactaagtatcaatggagtgaccgtaattttaatgccaattatggagggattcctaagaatgtgtggcttcatgttactgataaactttatcagacacttcccttgtatagtaatttgaaaacgaccggtgtctatatctatgcggaggatattcgtgtaaaatctcgtaaagccgtagttcacgccgaatccgaaataaaaaatgaatataatcgggataagaaagtcgcttataaggttgaagtgtgtgatcgtgacgggaaaagcataaaaagttttgagggtactcagacggtagtaaaaccgggtgaaactgcgactttggaagcttcagcagaaatagacggacttcatttctggagttggggatacggatatttgtacacagtaaaaaccagtttatgggtggatggcagaaaagtagatgaagtggctacccgtaccggtttccgtaaaactcgtttcggcaaaggaatgatttggttgaatgaccgggtgattcagatgaaaggttttgcacagcgtaccagtaatgaatggccgggagtcggtatgagtgttcctgcatggctgagtgattatagcaacggtctgatggtggaagataatgccaacttggttcgttggatgcatatcaccccttggaagcaggatattgaatcgtgtgaccgtgtcggattgattcaggcgatgcaggccggtgatgcagaaaaggaccgtgaaggccgtcaatgggaacaacgtacagaattgatgcgtgatgccattatttacaaccgtaataatccgagtattttattttatgaatgtggaaacgaatcaatcagtcgtgaacacatgatagaaatgaaagcgattcgtgataagtatgaccctcatggaggccgtgccatcggttctcgtgaaatgcttgatattcgtgaagccgaatatggtggcgagatgctttatatcaataaaagcaaacatcatccgatgtgggccatggaatactgccgtgatgaaggtctgcgcaaatattgggatgaatattcttatccatatcataaaaatggggaaggaaataattcattccgttctgcaatgactaataaggtccagaaaaaggtggatgcccgtgcttataatcacaatcaggattcctttactattgaaaatgtaattcgttggtttgattattggcgtgaacgcccgggtacaggtgaccgtgtcagctcgggaggtgtgaaaatcatcttctcggatacgaatacacattatcgtggtgtggagaattatcgtcgtagtggtgtgacagatgccatgcgtatccctaaagatcctttctatgcacatcaggtgatgtgggacggatgggtggatatagagaatccccgtattcatatcgttggtcattggaactataaagaagatgtggtgaaacctgtttatgtggtatccagtgctgaaaaagtggaattgttcctgaatggtaaatctttaggaaacggtcaaagagattatcatttcttgtatactttcaaagatgtggcatttgttccgggcaagttggaagctgtagggtatgataagaatggaaaagaatgttgtcgcgctgaattgcagactgccggcaagccggaacagattaaactcagtgtgattcaaagtcctaaaggctggaaagcggatggagctgatatggtattgcttcaagtggaagtgatggataaagatggcagacgttgtccgctggctaatgatttgatacattttgatgtagaaggaccggctgaatggcgtggtggaatagcacagggcaaagataattatattctttcaaaagatttgcctgtagaatgtggaatcaaccgggctttgatacgctctcttacgactccggggacagttcgtataacagccaaggctgatggattgcaatctgccgaaatcagtctttcttctgcacctgttgaagtgaagaatggcttgagtaactatattccgggagatgaactggaaggcaggctgacccgtggagaaactccgttgactccttcttacaaggatacgaaagtcgatgtgaatatcttatcggcggttgccggagccaatcaggatgaagtgataaaaagtttcgatgataatgaattgagtgaatggaagaatgatggcagactgaacagtgcatggataacttatagtttggaacgtgcggcccgtgtggatgaaatttgtatgaaacttaccggttggcgtttgcgcagctatcctttggaaatatatgcaggtgatgaactgatttggagtggtgagactgaaaaaagtttggggtatatccacctgaatgtaaaacctgtattgacaaatgagataaccattcgtttgaaaggtgccagcaaggaaggtgacggtttcggacaaattgtagaagttgctgctcctgccgcaggtgaattagacttgtttaaggcaaaaaatggcgataaaactaatcacgagttacgcattgttgaaatcgagtttaaagagaatttgtggcaataaaaacgaaaatattggataaatcggatattttcatgggttaaagattggtgaacaggaatttcttttttaagtagataggtggggagcctccccacctgtattaagggtttataaattgttagatgaaacattggattatgatgaatatgcttctgcttgtcggaagcatattcgctttttcccaaccttacagtggagaaaagctttcaagaggattgattggaattcctacagaggatggaatgtattttagctggcgcatgaccttggaggatgcagccggattacaatttgatttataccgtagttccggtggaggtgcggaggtgaaattaaataaagaaccgatagatcggacttccgattttttagaccgtacggttgattatacggtggataatcgttggactttaaaagcaactaccggggaagtcgctatctggacccgtctgaaaggagaggaacggaatccttatttaagtgttcctgtttgtaaaccggaagacggagaaatagcaggtgaatcattcacttatacagctaatgattgtagtgtaggtgatctggatggtgatggagagtatgagattattttaaaatggtctccttctaattcaaagcgaccgccacaacgtggctttaccggtaatacctatttggatgcatataaaatggatggaacaagattgtggcgtattgatttgggaccgaatgtacgttccggagcagccactactaatttcctggtctttgattttgatggagatggatgtgcggaaatctgttgtaagacaggagatggtactgtcgacggactgggacatcggataggagatgcccaagccgactggaggacatgggataaaaaaagtcctacgtatggtaagatagtaaatggcccggaatacctcacggtttttgagggacgtactggaaaagaactggattcgaaagaatatattccaacccgttatcccttggatggttggggaggtgtcggtggtaattgtggtaatgacaatactggtggtcgttcagaccgttttacagctggagtagcttttctggatggaaaaacgccttcacctgtcatggtaagaggatggtacggacggacggtggtggctgcatggacttttacaaacggggcattgaaacatacatggacttttgatagtgcggcaccgggttgggaggcctattcgggcatgggaaatcatagtgtgaccgtagcggattttgatggtgatgggtgtgatgaaatctgtgtgggggctatgactgtagaccatgatggtaaaggactgtttactacgggcttgcgtcacggggatgctttacatgccggacgttttattccttcccgtcaaggtatgcaggtttttggcgtgcatgaaaatgaaggcgataatgaaattgtaaagcgtactcctgccgtagctatgtttgatggagcgaccggagaaattatctggcaggatggtttgggacaagatgccggtcgtggagtagctgccgatattgatccgcgttatgatggagcagagtgttggtgcaacataggaggtttgagaagaggggataccggagaaataatcagtaatagaaagcctgactcctgcaattttaccatttattgggatgccgatcccttagcggaactactggatcatgtttccatcagtaaatggaattggaatgcggaaagtacagatttattattgaaagccgagagagttgtttccaataatggaacaaaaggtaatccgtgtttgtcgggtgatattttaggagattggcgggaagaggttatttgggcctccgaagaccagacagaattacgtatttattctactaccataccggctgtggacagacgtgccacatggatgaatgaccgtcagtacagattggcgatagcttggcagaatgtagcgtataaccaaccgccgcactctagtttctagccttgtcgctactctgattaggatatatgtactattggttgaacgaataaacaggaaaatgaatgaatttctattctccggtttgttcgttcatcttatttttgtgaaagatttgaaatgcaataaaagaaaaacactataaatgtcatgaaaggaaataaactttgtttatgctttttgttagctgccggagtaggattgggagcacatgctcaaaataaaatagctgctccgatgaaggatgtgaaccaagtcgttgataatacgcttgatagtttaaatgtggcgcgttccgcccgtcctgtttcaggttccagccggaaaggggataatccggtgttgttccttgttggaaattcaacgatgcgtaccggtactttgggcaatggaaataacggtcaatggggatggggatattttgaacacgagtattttgatgaaaataagataaccgttgaaaatcacgcattgggaggaaccagtagccgtactttttataaccggttatggcctgatgtcttgaaaggagttcgtaaaggtgactgggttatcatagaattggggcataatgacaatggtccgtacgatagtggccgtgcccgtgcctctattccgggaattggcaaagacagtctgaatgtgactattaaagagacaggagcaaaagaaaccgtatatacgtatggggaatatatgcgtcgttttattcatgatgtgaagaaaaaaggtgcttatcctgttttgatgtctctgactcctcgtaacgcttgggaagatgcagacagcactattattacccgggtgaatcagacatttggattatgggcgaagcaggtagctaaaaaagcgagaattccttttattgatctgaatgatatctcggcacgcaaatttgagaaattcggcaaagaaaaagtaaagtatatgttctatctggaccgtattcacacaagtgcttttggcgcgcgtgtcaatgcagaatctgcagccgaaggaatccgtaattataaggggttggaactggcgcgttatttgaaaccggtagaaaaagatacggttacgggggctacccgtaaaaaggggaatcctgtattgtttacggtgggagacagtacagtgaagaatactgataaagatgaaaatggcatgtggggatggggaagtgttattcacgaactgtttgacacagaaagaatttctgtagagaatcatgcgaaagcgggccgcagtgcgcgtacttatttagatgaagggcgttgggataaaatctatcatgcacttcagccgggagattttgttttgatacaattcggacataatgatgcaggtgacataaacacagggaaagcgcgtgcggaattacccggttcaggaaatgaaagcaaggtcttcaaaatggagaaaaccggcagctatcaagtggtttattctttcggctggtatttgcgtaagtttattatggatgtaaaagaaaagggagctgttcctattgtcctgagtcatacaccccgcaataagtttgataatggtgagatagagcgcaatacaaattcttttggtaaatggacgcgtgaagcggcagaagcggccggggcttattttatagatttgaataaaatatcaggagacaagctccaagatatgggatacaatcaaggtttgcgtgtagtaggaacgtatttcaatcatgaccatacccatacctctttgaaaggtgcccgtatgaatgcccggagtattgctgacgggctgaaagctacggactgtccgttaaaagattttttaaagtaaatgaaaacaaagcaacatcgtatgaaaaatctgtttctgtttttatttttattagttgtctttacgtcaaaggcacaggataatagagtatccggtttgaactcccgccagtttactaaatactggaaggttgaatcggaatcgcctgattataaagtgacgtttcagggagataccgctgagatagtatctcccaagggattgactctttggagaaaagagaaaatgagtggaaaagtgaccattgaatatgatgcatgtgtggtggtggagtcggatggagatcgtctgagtgatttgaactgcttctggatggcatcagaccctcaatatcccgataatttatggaagcgagaaaaatggcgtagcggtatattcctgaattgttattctttacagctttactatttgggatatggtggtaatcataactctactacacgtttccgtcgttatgatggggatgagtcgggtattacaaatcctaaagcccgtcctgctattctaaaggaatatacggatgccggacatttgctgaagccgaatcattggtatcatatcaagattaccaacgagaacaatagggttagttattacatagacggtgagcgtttggtggacttcagggatgctgaaccgttacgggaaggctggtttggttttcgtaccactttgtcgcgtactcgtattacaaatttcagttatgaatgctcatcgcaagaagtggctactgttcctttgcaatggattggtgaaactccccggcaggataaggccgtaagtttcggagtgccttttgataaaggggaagtttttccggaaaacaagttacggctatctgcagaaagtggtgaggatattcctattgatacttggactttggcttattggccggatggttctgtaaagtggggaggaatagcaggagttattcctgccggaacagaaaaactgactctggaaaaggcggtaaagaaatctaaggcgaaatccaaactgccggatacagataaaaaaaagtccgtttctgtggcagaaacatcacagggtattcatatctctaccggagtcatttcagcatatatacctcgtcaaggcgaatttttgatagatagtctgttgtataaaggtgtgaaagtaggagaaaaggctaggcttatatgccatacgcaaagcgaaccggtacttgaaagtacttctcaagtttcttttactaattatataggagaactgaaatctgtgactgtagagcgtgccggttctgtgcgtgcacttgttaaattggaaggggtacacaaaagtccgaatggtcgtgagtggttgccctttgtggtacggctttatttttatggtggcagtgagcaagtgaaaatggtgcatagctttgtatatgacggagatcagaacaaagatttcattcgcgccttgggagttcgttttgatgttcctatgcgtgaggctttatacaatcgccatgtagctttctcttgtgccgatggtggagtctggagcgagcccgttcagcctttggtgggacgacgcatacttacattggataaaaccggaaatggagaatcttcgttacagcaacagcagatggaaggaaaacgcattccttcttatgaagcttttgacgaaaagaaccgtgctttgcttgatcattgggcttcttgggacagctatcgtctgtcccaactgacagcagatgcattttcaatccgtaaacgtgccaatgacaataatccttggataggtactttttccggtacacgtagtgagggttatgcttttgccggagatataaccggaggcatggggcttgagttgcatgatttctggcagtcttatccgtcttctattgaaatctcggatgcaaaaactccggtggctgctcttaccgcatggatatggagtccggatgctgagccgatggacttgcgccattatgataatgttgctcatgacttgaatgccagttacgaagatgtgcaagaaggaatgagcaccccttacgggattgcccgtacaacgacttttaccttgatacctcagggtggttatagtgggaagaaagcttttgcagaacaagctaaacaacttgccggaccgggagtgctgatgcctgtacctgactatttgcatgccaagcaggcatttggtgtttggagtcttcccgatcgtagtactcctttccgtgcccgggtggaagacaggctggatgcttatatcagcttctatcaaaaagcgatagaacaaaacaaatggtatggcttttggaattatggggatgtgatgcatgcatacgatcctgtccgccatacctggcgttatgacatcggaggttttgcatgggataacacggaactggcttctaatatgtggctatggtataatttcctgcgtaccggacgtgctgatatctggcgcatggcagaagccatgacccgtcatacggcggaagtggatgtatatcatatcggtccgaatgcaggattgggtagccggcacaacgtcagtcattggggatgtggagctaaagaagcacggatcagtcaggctgcctggaatcgtttctactattatcttactacggacgaccgatgcggtgatttaatgaccgaggtaaaagatgccgatcagaaattgtacacgctggaccccatgcgtctggcgcaacctcgcagtcagtatccttgtacggcacctgcacgtctccgcatcggtcccgactggttggcatacgccggaaactggatgactgaatgggagcgtaccggcaatacggcttatcgtgacaaaattatagccgggatgaaaagtattgtggcactgcccaaccgtatctttacaggtccgttggctttaggttatgatccggctacagggattattaccagcgaatgtgatcccaagttagaaagtacaaatcatttgatgactatcatgggaggttttgaagtcatgaatgaaatgatccgtatggttgattatcccgaatggaatgaggcatggcttgatcttgccgcccgttataagcagaaagcatgggagttaaggaagaatcgtttccgtatatcccgtttgttgggatatgcagcctatcatacccgtaatgcaaaaatggcggaagaggcttggacagatttgttttcccgcttggaacatactccggctccacctttccgtatagaaactattcttccgccggaagttcccgctcctttggatgaatgtacaagtatcagtaccaatgatgctgccctttggagtctggatgccatttatatgcaggaagtgattccggtggatggtgaataaatgatgtgaagattatcgtttggtaggtatggattacatggattccacaaggtgttttattctttttgtggaattcgtgtaaaaaatcaataacagataaaaatgggttcacttgaagaaatttattggaacatggcaaaaaaaacaatggaaagttggagcacattatgctatcatgccctcatagtgatggtaattatctcattaacaatgcgctatatatgagtgcatcatctttatgctctcataatatgccctcatgctctcatgtcatatttatgtgttcttatttatatcttattgtttgtcaaagagataaattatttatagttgtatcggtaacttatgtctgaaatacgtttttggtcctttgggggggctaatgatgcataataaaggctcttttcatttgctgctttccgcatatcttctttctgcattattcttgatatataatcattgacatacagatgtttatcaatattcaaccgtttgtatttacttaatcacataggtggttaagtctagttacaatagtgactaagtctaatcatataggtgattaaagttaatcacaaaggtggttaagtaattttgctagtttagttgagcaatcatgaaggaactttgatgtaagcctgttcctatttttacgtaactacatctctatatttgtatcgtataatcggaagatatgcttttgctatcggtataaatcatctgataataagtaatatacgtctgtgtgagaaagtaaatacactgagagcatgagggcatttatgagagcataaagatgatgcactcatatatagcgtattgttaatgagatgattaccatcgttatgagggaatgagagcatattgtcttccaactttttttgtaaatctgaataagaaatatgtctctttgaaatctatatagttagaaaaattgccgtattcttaggttatagatgtctttagacggatagggtgatattttatcgtacctattttttgtttttgtaaaaaggagcattttgtatgaagaacataatcagaaagataagaacttaccatcctgtttcggggtgaagcgttgggaacattgacacaacttttggagaggcatatattcccggcagaaatacttcttatcatcatatcagttatgaagtgatagggtacaaggatataataggatgtacgggttcctatttaggggcaaaaaagaatagaagtaagggtaagtagtcttttaattctttccgtaattgttttagtgcctgttgaattctgtaatctactgttttggaagatatgtttaattcttctgcaatttcctgataggtcttattttggaaacggtgcatttcaaaagctatccgataggattctggaagattaagaattgctttttctattttttgtgttaattcatctataatataaaaatcaggatcttcgaatagttcctgtatgtctggagtgagtatattttctatttggaatcgaagagaatttctggtcattaaggtataacatttgttttttactgctttgaacaaataatgatgaacagaagaatctatatgatttgtttttctattctcccatatctgtaacatggtatcttgaaccacttcttctgcatcttctaatgaaacaaaactgcgggcaaaagcacaaagcatagcataatatttgatgaataaagtatcaaacgctttcttattgccctgttgcatggatatatacagttgcttgtctatcaaattatcatttgtggtttccatagattatagaagaaaatgttactgcaaaaatacataaatttaaatatgaaagcgcttaatcgaaaaataattcaaaaaaaacagtttttggtttaggaactttggatcttggttagacttattataaaaggacattatgataaattcagatacccaaatagatgaagcgcttttactccgttattttgaaggagaagtgactctaagtgagaaagaagagattgaaaaatggattatctcttccgaagcaaataaaaagctggccaagcagatttattatctttcttttgccacaaaaacaatggataccttaaaacggactgatgcacgggctgctttgaaggaagtcagaggcaggataagaagggaacgacagctacaatgggggcgatgggcacagcgtgccgctgctattcttgccatacctttgctactgtctactttgtatttatggatgaatggtaatgagcagaataaagtgaattttatagagattcgtactaatccgggaatgataacttctactattttgccggatggaactcatgtaattcttaattccaattcaactattgtttacccttctcactttgacgaaaaaagtcgtaatgtccaattgaatggcgaagcctactttgaggtaacaaagaattcccgtcagccttttatggtccgaacgccgcagaaagctgttgtaaaagtttatggtacccaatttaatgtggaagcctatgctgatgataaaacaataactgcaactttggtggaaggaagcattgccatggcatatgaaaataagaaaagtaattggacggaacaggaaattcagccgggacaggaaattgtttatactgctgcacagcaacaaataaaaattgatcaggcagatgtagaggttatcacttcttggaaagacggaaaacttatttttcgtgatactccatttaaggaagttcttaaaatgctatctaaacgttttgatgtggatttcgtagtaaagaatcccaaatgttttgaagcctcttttaccggtgtacttgagaaacaacgcttgggacgaattctggaatatatcagcgtatcttcaaatataaaatttaagtatgcagaaagtaataatattcatcaagaaaaacagaaaatagaagtttattaatcttttaaaaataacaagctatgttgaaacatcctacgtaaaacaatctacagaaaaaacacactactttttatctgtaatcaaattatgaagttaaaattaaatctatttacgaaaatgaagaaaccagtatgtaaactgcctttgtcgctgaaaataactatttttgttcttttcagttttgccagcttgttatatgctagcaataattatgcacagagaaccatgttgaacatcagttctcagactcggacggtctctgaagtcctgaccgaaattgaaaaacagacggatttcacctttttctataataataagcaggtcgatttgaaacgtaaagtaaccttgaatgtcaagaatgagaatgttttttcagtcttaaagaagcttttctccggaacaaatacgacctataaagtcttggataagaatattattctttctgaaaagtctgccatttcttccgcaacgaaagaggtagccatcgtacaacaggtaggtcgtagcgtaaagggcgtggtggttgatgataaaggagagcctgtaataggtgctacggtgatggtcaaaggttctactaatggaactattacggattttgatggaaattttatattgaatgatgtctcaagtaatgcttctttgattgtcagttatgtggggtatgtaactgaaacaataagtgtaaatggaaaatcttctttcaaaattgtgatgaaagaggatgctaaaacccttgaagaagtggttgttataggatatggagtagtgaaaaaacgtgatttgaccggttcttctgtttcagttaccggtgcagatttagcggaagttcctgttactaatgcggctcaagcgctagcaggaaaagctgccggagtgaatattgtttcacagaacggagctcctggggctgaagtgaatattaccgttcgtggaggtacttccattactcagtctactacacctatctatattattgatggcttccagtcggaagatggtttgaagaatattgatgtaaatgacattaggactattgatattttaaaagatgcttcgacaacagctatttatggagcgcgtggatcaaatggtgtggttcttattacgaccaaaagtggaagtagtggcaagacaactgtgaattacaatggctatgtatctgtggattggttgggcaagaaactggatttgctcaatcttgaacagtatgccaaatatcagtatgaatggtggactcttgccggagaaatgaaccagtatgcacgtatgtttggaggggattatacggatgatggattttatacgggagcatggtctgatatagagcaaacttatggcggacgttccggaatagactggcaagataagatttttggtggaagtgctcttactcaaagccataatctatctctttctaccggaacggaaaaaactcaagtattggtaagctacaataatatgtcgcaagacggtatcgtaaaaaatcacggatattaccgtaatacgattcgtactaaagtaaattcccagctatggaaaaatgtacgttttgatatgaattcttcttttaattacgccaaaacattaggtggaggttcttattccggattaaaacaagctattttgcgtcctgaaactggcggaatcctgtttactgatgatcagcttattaatgaagagttaaataccgaattccgtactttcagtaacgaatatgatgtgtataacccattgataaccaacgatgctataataaatagaaaacttagtcgtatttttagtgttaatgccggtgtggacattgatttcttgaaggattttacattccgtacagctggtagttataattgggcccaaatcaaaacaactaatttcgatgatggtcgtacggccaatgctcaactcaaaggcggaccttatggcagtattgataataaggaacgatatgcttatcaatggactaatacattgaattggaaacatacgtttgagaagcatgatttgggcgttttgttaggacacgaattatattatacaaatacatctggtacagaaactgcctataaggcatttcccgatactaatttcggtcttaatgatattagtatggccactcccgatacatggaagtcttctttagaagaaaatgctttgttgtcttttttcggtcgtctcaattatacttttaatgaccgctatctttttacagcaaccttacgtgcagacggttcttctaaatttgccgagggtaatcgttggggctattttccttcagcagcggcagcttggcgcgtttctgaagaaggattctggaaagataatgctatcggaaatgttgtcaataatttcaaattgagagtaggttatggaactaccggtaattgtaatattgataattatatgtatgctactgcctataatgctacggtatatcctgtgggcaatcaggaaacggcggctttggcacctggcagcacagtaggtaataataacttaaaatgggagaaaaccgtttctacgaatatcggactggacttgggtttgtggggaaacagagttaacctgacattggactggtataacaataagagcgatgatttgcttatgaaagtggctatcccgacatcaaccggttatacgcaccaatatcagaatatcggttctatccgtaatcgcggtcttgagatagctataagcagtacgaacatccgcaacaaacattttacttggactaccgatttcaatatctccttcaatcgttccaaggtcttgagaatagacggtgagaatgaatattatcagactagcgtcagtggtggtaccaattcttctgttctataccgtgccatcgtaggtcattctttaggtgagatgtatgggtataagaccaatggagtttatactaccgacgattttgtgcagaatggtgataaatatgttttgaaagatggtgttatttatcagaaaggatctgtaaaaactcaatataaaccgggtgatatcaagtatgtaaatactacggggcagacggatgacaaggggacacctgtttataattctgatgatatgacagtcatcgggaatgctaatccggattttaccggaggttttaaaaatactttttcttataagggctttgatctttctgtatttatggtattctcttatggtaatgatatttttaatatgtctacccagcgttttgtcggtccataccaaccgtaccaaaatatgcttgcggatgctgccaatcgtttcactctgctggatccccgtactggaaaagaagctacggacctcaaccgtatagctgagcttaatcctaatcagcatgatccgaacattctgtggagtattcataatgacaaccgcgcagctattactactccgcttgatcgttttgtggaagatggttcttatcttcgcataagcactattactttaggttatactttcccgaaaaagtggttaagtaaagcttttatcagtaatttgcgtctatattgtacattgaataatccattcactattacgaattattcaggttatgatcccgaagtttctaaggaaagttctattttaactccgggtattgatgattcttcttatccacgttccaaaggatttgtatttggcattaatctttcattataataataggagagttgtattatgaagaaaatagtatattatatagctgttgcctttttggcgatcaatttcagttcttgttctgactttctggatcttccttctaaatcgaagacagacagtgaaagtgttttctcttccattgataaagctgagatggctgttcttgcttgttacacaggtgtctggatgcaggatgcttggtataaggctcagaatggaacagatgaaatgtggtctactgagagtaattcgaatgctaataattatgcggccaattatgtgctcaatgatcaaagttgtcccacaggcatttatactacctcttattccagcattgagcgttgtaattcatgcttgaaaggattacgtgcaatgagcctttcgggagaggacgagagaaagtgtcacatttatatagctgaatgtctggctgttcgggctacttgctttctgaatttgattcgttattttggggatgtaccttattctactgttcctgtattggatatgacgactttttcttcttcccgtgttgatcgggatgagatttatgatggcattattgccgatttgcaagaagctgtcgaagtacttccttggtatagtgaaggatttttctctactcctgagcggatttccaagaatgctgcttatggattattggcccgtacagctctttatgcagcaggttatgctttgcattgggatctgaatacttatgataaatctactcttcagatgcgccgtcctttggatgaatcgcgtgtaagaaaattatataccattgctgatgaagcttgtaaagcagtgattagtaaaggtgaaaacagcttgctttctaaatatgaggatgtgtttagagccttgaacgagggtggcgtttataaccctgaagaggtaatgtttgaatatgctgagtttggcaatacaaccaatggtcgtgtgggatatacaaatggactttgcattcatgcttccaatgccctttatggtaaaacattgcctttgcaactgattcatcctaccttttatctttcttttgccgatgatgatacccgtcgggatgttacagtgggcaattacagtattgatgcggctggtaacgatattgctgtgccttatggcgctttgaatttgggaaaatggcgctgcaattggaaagccggtccccgtacggccactttgaaaacggatgtcaattggcctatacttcgttattcggatgtattgttaatgtacgcagaagctgaaaattacttgaacaatgggcccacggaagcagctaaggcagcttatgaacaagttcgtctgcgtgcttttgcaggagatgcctctcgtataggtaccacaccctctacttatgatactttttttaaagcgattgtgaaggaacgtgcctttgaattagctacagaaggatggcggcgtactgatcttatccggtggaacttgttggctgaaactttggctgaaacaaaagcaaataccgagaaactggctatgcgtgaggttccttataatgaggtgaagacttatcgggcatataaagaagcaacttctacatcttggaaggatcctttggtaggtcttacttatatagatttcgatcatcagcccacagaaacggaaatgagtgaactggttgcccggtatggaggcacttggaattgggtaaatatgtttattactcccaatattgcaggagaaactaattccggtatagccggacaatccaagatattgggttataaagaaaacaataacacgttgcccgcctggattaccgagttatatcgtgggtttatcaagaatcaggctgaactttatactttgagcaccacagccattattgatgttaatcctgggttaaccggtcaacaacatcctgcttattaatcaataaattataaacatttctatataggaagggggaagaatagtgatgattttttgtttcttttctcttcctatcttataaaaaaaacagtatgaaaatgatatgtatggcggtaatgcttttcattactttgttgtctgctggagcacagaaaaacattccggcctctgatataaaagtggctatgatgaaagctacacgtttcatggtagagaaggtcagcaaccgtggtggctatttatggaattacagtcctgatttctcccgttgttggggggaactggaagctaaaccaagtatgatatggatagaagctggtacacctgctatgggaaatgtatttttgaatgcttatcaattgactggagaatcttattacctgaaagcggcacaagcagcggcagatgctcttatctggggacagcattcaagtgggggatggccttatatgttggacttttccggagaaacttcgcttaagcaatggtattccaaagtacagaaaggatatattcattgtgctcaggaacatgctcattattatggaaattgtacttatgatgatgcggctacctacgatagtggaatgttccttttgcgtatgtatttactgactctggatccgaagtataaatatccggtagaaaggtgtcttgattttgttttggagagtcagtatcctattggtgggtggccgcagcgctatcctctccattatgaatatgtgaaaggtgataaggaagactatacttcgtttattaccattaatgatggagttcatactaacaatattaattttttattggcttgttacactttattaggtgaaactcgggcattggagcctcttcagcgggctatgacttgtgtcttggcattgcagggaggaaagcctcaggcaggttgggctatgcagcataagttggatctcaattactctccaggtcatgcccgtgattttgaaccggcaggttatgcggctacagctactgccgagatgtgtcgcaacttgatgcgtttttatcgttggactggggatactaaatatttagcccgtattccggatgcatttgaatttctagaatctatccgatataacgacgcgcaaatgaaacaattgggtaagtctgtaaaaccgggacagatattgtgtcctacttttgtagaagtaggcactaacagacctctttaccttcataatgatccagatcattattgggtggattatgattatcatggactcataactcattatagctctacgcgggctattgatttgcaatctttaaaagatgagtatcagcatttgctctctctctccaaaggggaagtgacaaaagattctccgtttataggtcaaacggatatttctggaactttactaagtcatttaatgcgtggtaaaatgcagcaagcggatacacaaaaagtagatagtctgctcactattttgaagaaaaaagattatttacccggtcgtttgcctagtgtttcgaaagagaatccgggcttctctaatgctcctcttccttctgaagtcatttccatcaaggaatatatgaatggtatgtctacatttattcagtatcttactaaatagtgtctatgatgagaaataaaacattttttattgttgtattggcagcaatgctgctggttacagcttgtgccgatactgctattgaccgtcatgcattggtgatgcgtaataaccctcatgttacaaaaattgattctcttcattctttgacagtcggaaatgggcggttcgcttttactgccgatgctacgggattgcagacttttcccgaatattataaagaaggcttgtctttaggtacctatagcgaatggggatggcacagttttcctaacaaggaggactataagatagttgaaactctacaggatcatccgcttcccggtcatcctcatgggatttatgccgtacaatttccggaaggtcctgaacgtaatgccaaagcggcagagtggtttcgtgccaatccgcaccgcctgcatttgggaaatataggatttgacagcttgttggtgagcgatattactaaaatagaccagactctcgacatgtggaaaggagaacttcattcccatttcctatggagaaaacttccggttacggtaactacttcttgtaatggcgatagtgacattgtctctgcttctgtgtcttcatcggcaaagctggcagttggcatccgtttcccttatcctacaggtgaggcagctgacgatgctacttgctggacagccgatgaatgccactctaccgacattattctttccgaacctcaacgggctcttattcgtcgtactgtagattctactgtctattatgtggaaatcagttggagtggtaaagctgttctttctcaaacagggaagaacaggttaaaattgacaccttccgataagcagtggaatttcaatgttgggttctataagcaccaacctgtagtgcctcagcctgattacaaggctaatctgctttcggccaaccgttgttggagggattattggcagacatccggtgttattgatttttcttcctgtacggatccccgtgcttcgcttttggagcgtcgggttgtgctgtctcaatatttgctccgttcgcaggaagcgcaaaattaccctcctgctgaaaccggcctgacttataatacatggtatggtaaatttcatttagaaatggtaatgtggcacagttttcattatgcgctttggaataaagcagatcttttggagaaacaattgaaatggtataagactgccgtaccgatggcatgtgatattgcagccagacagggatttaatggcatacgttggatgaaaatgactgatccatcttctaaagaggcaccatcggatgtcggctcttttattatctggcaacaaccccatgtcatttatatgtcagaacttatctatcgtgcacgtccttctcaagaatttcttcgtgagtatgctgatatggtagagcagacggctgcttttatggcttcgtttgttaattatgattctgataatgatcgttacattattcagggagcttgtgcggctaatgaatcctataatgaagagacgacccttaatcctgcttttgaaatggcttattggcattttggcttgtccatagctcagaaatggcgggagagacttgggctgcaacgtcatgcggagtgggatgaaattcttgctaaattagctcctcttgctactagtcctgatggcatttacttaccggcggaaaagggtagaggaatacctgatttcgtgaatggtattcctgctgaaaaattaccggaaatgccggccggtggatacattaatggccagcgtcctaaagaagcagacggttctgtttctctatcggaaggcgagaaaagcaaacgtaagcatgatcctttttatgttacaggaacttcttctgaaaatttgctggcttacggcatgttgcctgagtcgcggctcattgatcaagaaaaaatgcaaaagactttggtgcgtgcagctcaaaattggaattggtccggaggatcttggagttggaattatcccacattggcaatgaatgctactcgcctgttgcagcctgagattgctttgcgtgccataactatggacaaccgggaggacttgcttttacctagtggtaataattatcgttcgactcgtcttcgttcttatttgcctggtaatggagggctgttattagctgtttctatgatgtgtgccgggtgggacggttgctcggtcagtaatccgggatttcccaaagatggtaaatggaatgtgcgttgggagggattacatcctatgccataggatataaggaagtcgtaaaaatgaatatctatttacagtgtataaaaatttaggtaatgaaaatattgttattttgctctttattagtgatgttcggtgcctgtactcatcccgtacagcagatttcaatagaccgtaaggcgttagtgaatcggaataatcctcaattttcagctttcgattcgttggcttcgctttcagtagggaatggcgaatttgcatttacagtagatattacaggattgcaaacttttcctgacgcttataaaaaaggtgtccctctaggtacgcaaagtcaatggggatggcatagttttgctaatatggacggttatagacacgaagaaacattgagtgaatatgattttggacgaggacataaggaattgtatgcagttcaatctcaagaagataaaagacaaaagaatgcatctgattggtttcgtgccaacccacatcggttacatttaggagtgatcggatttgaatggggggatgaggctgctatttccgatattaccagaatcagtcagactttgaatttatgggaaggtgagatactcagtcggtttacttggaaagggaatgaatttaatgtacggacggtttgccatccggcacaagatatgatttcagcccatatagacagtcacttgcatacagggataaaatttcattttccttatcctacaggtattcatactgataatgcatgtgattgggatgccaatgataaacactctaccgaggttcttaaacaggacacacaaagcgctgtgttaaagcgtacgttggattccacggtatattatgtagaattaaaatgggaaggcaaggcattattgaaagaaaaagagaaaaattatttcgtactgcttccacaagaagatgctttttcgttttcatgtgcttttaccgctaatgagccagatcagcttactgtactccctgatttttttgaagttgaaagtttggctaagaatcattgggtgaacttttgggaagaaggtgctgcggtagatttctctcattgcacggatctgcgtgctaaagaattggaacgtcgggtagtgcttagtcaatatttgcttgctattcaatgcgcgggcagtacccctccgcaggaaacagggctaacttacaattcgtggtttgggaaatatcatcttgaaatgatttggtggcatcaggcatggcaaccgctttggggacattctgaattactcagccatactttagaatggtataaaacggtagagcctatagcaagggaagtggctcgtcggcaaggctttgatggaatccgatggatgaaaatgactgatcctagtggtgtggaggcaccttccagtgtaggcagttttttgatttggcaacaaccgcattttatttatctggcagaacttctttatcgctctaaccctgataagaaagtgatagagaaatataactatctggttcaagaaacagctaagtttatgtatgcttttgccacatatgatgaattgggagtgcggtttattttaaagggagcgattccagctcaagaaacattgaatgcgagtactactataaatcctccttttgaactttcttattggtattttgccatgcagatagcgcagatatggcgtgagcgtgcaggtgaaaaacgtaacttggaatgggatgagttaatagacaaactttctccgctggcttataatgaggatgggttgtatctggctgcggaaaatgcaatagacacttataaggatattcgttttaccagtgaccacatggcagtgttgggtgccgtaggtatcttgcctatgaataaattaatccgtgaagattacatgaagaatacacttcaatggatatgggataattggaattggggaaagacttggggctgggattatcctatgacagcaatgaatgctactcgattgggtgagccggaaaaagcggtggaggcattgcttatgaataaacgtaccaatacatatttgccgaatggacataattatcaagatccccgtttacgtgtttatttacctggtaatggtggtttattaactgccattgcattaatgtgcgctggttgggatggttgtgaaatagaaaatcctggtttcccgaaaaatggaaaatggaatgtaatgtgggagggattgtcgcccatgccttaaattgatttgataaagtggcgtactattgtttatgtgctgatgtatcaataggctgtgtaatgtttcgcatagctattggtatattggcacattggtttattgttgtaaatgtggtaattgtttattgaggctttttgtattctgcaacataaaaaacaccataaatacgataaataatacaggctttatggacgaatttccatattattgtatcttattctatggaatctaattccatttcgtcttatttttgcaatattgaaaataaaaactatgaaatacaaaaaactcatttcttttctagctttctttttagcagttttgtcagtatatggacagaacccttttgtcttgaaatcaggtgaaccggtgactattgcttgtggtaattcagaggaagaagttgtacatacagctttgaatttgctcaatcgtgatgtagagtctgttttttctacccgcataatcgttactccagaaagtaaaaaaggaatgattatagtcggaactatcggacaaagtgatttgatcgctaaagcaggtgttgatttatctcctataaaaaataaaaaagaagcttttctgttgaccgtttcttccactggtaaattagttatagccggcagtgacaagcgtggtactgcatacggcgtcatggaactttcacggttgataggcgtttctccatgggagtggtgggcagatgcgacccctgcaaagaaagagatttttcaactaccggcttcttatcggaatatgcagtttccttctgtagaatatcgggggatttttatcaacgatgaggactgggggctgactccttggagctggcagacatacgagccgagcaatgtgaaaggacaaataggcccgaaaacgcatgaacgtatctttgaattgatgcttcgtctgcgtgccaataccttctggccggctatgcatggctgttctgtacctttttattttacaccgggcaacaaagaagtggctgataagtttggtattttcattggaacttctcattgtgaaccgatgatgcggaataccaatggtgagtggaaacgggatggagtgggagagtatgactatgttcataacagtgctcatgttttgtccttttgggaacaacgcgtaaaggaggttgcagagttggataatctgtatactttaggtatgcgtggagtacacgacggtgcgatgaatggtgctaagactatagaagaacaaaaagccgttctgactaaagtgctaaaggatcagcgcgatttgttgactaaatatgtaaataaggatgtgactcaagtgcctcaagtctttattccttataaggaagttttggatgtgtaccatgctgggctgcaagtacccgatgaagtgacgctgatgtggtgcgatgacaattatggttatatccgtcatttccctacagcagaagaacgtgcccgtaagggaggaaacggggtatattatcatatatcttattggggacgtccgcatgattatctttggttaggaactgctcatccttcgctgatatatcaacaaatgactttggcatatgagcgagggatacagaaaatgtggatattgaatgtaggggatattaaaccgtctgaatatcagatagaacttttccttgatatggcatggaatttggaagcggtgaagcagcaaggggttgtagctcatcaacgtcagtttctagagcgtgagtttggactggaagtggctgcacaattacaacctgtcatgcaggaagcttatcgtttggcttatatccgtaaaccggaatttatggggaatactcgtacggaagaaaaagatcctaagtttaaaattatcagtgatttgccttggagtgaacaagaaataaaagaacgtctgactgcatacaaacaattatcagataaagtggagcaggaatggcatacgctttctgcacaaaaaaaagaaacctatttccagttggcgaagtatcctgttcaggcagcagctcaaatgaatagcaaactgttgaccgcgcagttggcacgtcgtggaaaggttgattgggcggatagcgacagggcgtatgatagtattgtttcattgacaaaacgctataacacgaccaaatggaatcgtatgatggatttccaaccacgcaaacttccggtttttgaccgggtggaaagaaaaacagttttatccgttttacctgaaaaacgtcaggctgtctatacatggaatggtgctgattgcgttaatagttcaccggtagtatgcgaggggctaggttatgaaggaaaggcggtagcggtggcaaaaaataaagaacttacttttgagtttgctgcgtgggaaacggattctgtagaggtggaggtacgattattgcctaatcatccggtggaaggagaacggttacgttttaccatttctttggatggaagtgccacggagtctgtttcgtatgaaaccaaaggacgcagtgaggaatggaaggaaaatgttttgtgtaatcaggctgttcgccggatgattcttcctgttacacggaaaacctctcatcgtttaatttttactgcattggatgaaggtgtggtattggatcagatatacctttatacacctcggataaaatagggtgaacgaagatattcaggatatttgtgcatacagaaattacaatgaaaaacaacagataaaatgaagaagactttttttaaatctttggctggtattgcggccgtagcttttgccgtatcatgtacagcaccggctccaaagtataaaatggtaatagttgatgctccttttgctatggaacccatcaaagaatgtgtttttcccgaacaagatttttccattgtggattatggtgcggtgaaaggtggggaaacagtgaatacggaggccatcgccaaagccatagtagcttgtaataaggccggaggaggccgtgtggttattcctgaaggggaatggttgacaggacctattcattttcaaagtaatgtaaatcttcatttggaagaaaatgccatattacgctttacagataatccttctgattatctgcctgctgtgatgacttcatgggagggtatggaatgttacaactattctccgttgctgtatgctatggattgtgagaatattgctattaccggaaaaggaacattggctcctattatggatacttggaaaatctggttcaagcgtcctaaacctcacatggatgctttgaaagagttatatacgatggcttctaccgatgtacctgtaaaacagcgtcagatggcaaaaggagaaaatcatcttcgtcctcatttgatacatttcaaccggtgtaaaaatgtgctgctggatgaattcaagattcgccagagtcctttttggactatacatctttatatgtgtgatggtggtatcgtacgtaatctggatgtaaaggctcatggtcataacaatgatggaattgatttggaaatgagccgcaacttcttgatagagaactgtgtgttcgatcaaggggatgatgctgtggttataaaggcagggcgtaatcaggatgcatggcgtctgaatactccttgtgagaatattgtgatacgccattgtgatattttgaaaggacatactttactgggaatcggtagtgaaatgtctggtggtgtacggaatgtgtacatgcacaattgtacggctcccgattctgtattccgtcttttctttgctaaaaccaatcatcgccgtggcggatttattgaaaatatctggatgaaaaatgtgaaagcgggaaagatgcaacgtgtactcgaagtggatacggatgtgctttaccagtggcgtgatttggtacctacctatcaggatagcattacattcatcaacggactttatatggatagtgtgacttgcgaccgtaccgaggctgtttatgatttgaaaggcgatgcccgtcttcctatcaagaatgtggaaataaggaatgtgactgtgggtgaagttacaaagtttgtgaagaatgtggtaaatgcggagaatgtggtggaggaaaatataatttacaaggagaaacaagataaacaatgaaaacacaaaaaaaactatggagtgctttagctgctctgtgtgtggcaactgtaacggttgcccaaccggcctacaattattctaaactgcaaaaagaacagttggggcgtggcgttgtggccattcgtgaaaatccatcggaggtagtggtgtcgtggcgttacctgtcttccgatccgatcaatacttctttcaatgtatatagaaatggagagaaaatagcggaagtctccaattctacaggtactttttatcgagatacttactcgggtaatgaaaaagcggtatatactgtaaaaccgatgataaatggggttgaaacaggtaagttgaatggaaattatattttgccggctaatgctccgtctggttatatcgatattcctctggacaggccggcagaaggtgtgactccttcgggacaaaaatacacctatagtcctaatgacgcatctataggtgatgtggacggcgacggtgaatatgagattattttaaagtgggatccttccaatgcacatgacaatgctcatgacggttataccggaaatgtttattttgattgctatcgtcttacaggagaaaaattgtggcgcattgacttagggcataatgtccgtgccggagcacactatactcagtttatggtgtttgatttggatggagatggtaaggcggaagtagtcatgaagacttctgatggaacaaaggatggaaaaggaaagataataggtgatgccaaggctgattaccgtgaaccgggtatcacagacggaaattcccatggaaatacacctcgtaaccaaggacgtatcctgactggtaacgaatacttgactgtattcaacggactgacaggagaagcgatgaaaacaattgattatgttccggctcgtggtaaattgaccgactggggagacaaccgtgccaaccgcagtgaccgtttccttgcttgtgtagcttatctggatggagtacatcccagtgtggtgatgtgtcgtggatattatacccgcgctgtgctggcggcattcgactgggatggcaagaacttgaaacaacattgggtgttcgacagcaataatccggggtgtggagactatgccgggcagggtaaccataatcttcgcgtaggcgatgtggatggtgacggatgtgatgaaataatttatggttcttgtgctattgatcatgatggaaaaggattgtattctacccgtatggggcatggagacgctatgcatctaacacaatttgctcccggattaaaaggtttgcaggtttgggattgtcatgaaaataagaaagatggttccactttccgtaatgcggctacgggtgaagtgttgtttcaggtgaaaagtagtatagatgtaggtcggtgtatggctgctgatgttgatccgcgcaatccgggagtggagatgtggtcatccgattcaaaaggagtacgtaatataaaaggtgaagtgattcgttctgacctcaagagcttttcagtcaatatggctgtatggtgggatggagatttgcttcgtgagttgctggataaaaacaggataaccaagtatgattgggaagacgatgtatgtcgtccgttaatgatatttgatggaacggattcaaataatggtacgaagtccaatccttgtttgcagggagatataataggtgattggcgtgaggaggtgctgctccgtacggaagataattcggcacttcgtctgtatgtgtcgcggataccgactgaataccgttttcatactttcttggaagatccggtgtatcgtatcagtatcgctactcaaaatgtggcatacaaccagcctacccagcctggtttttatttcggaccggatttgaaagaggggatatttagaggttatgaatttaaaaataaataaagactatataccatgaatctgaaaacattaagtatgatgggcgctctgttgctgctggcaggaacgggtgcgaatgcgcaaaagaagaaagaagtactgaatgattcgaatacgccgttacacttgttgcaacctgcatacaaagtgccttacggtatgctcactacagaggagataaaggccgatatggatcgtgtccttcgttatttggaaaagaatactccgactcgtgtcgttgataagaatacaggtaaggttattacggattatgccaatatgacggctgatgcacagctggaacgaggtgctttccgtctggcaagttatgaatggggggtgacttattcagctatgttggctgctgctgaggctacaggggatcaggcttattataaatatgtaacagatcgttttcagtttctggccgaggttgctccacacttccgtaaagtattggaaaagtatggaactgtagatccgcagatgaaacaaattttgactcctcatgcattggatgatgccggggcggtgtgcgcggctatggtcaaggtgcagatgaagaaaaattcaccggaacttaagccgttgattgataattatatggattttattgtgaataaggagtatcgtcttgctgatggaacatttgcccgtacccgtccacaacataatacgttatggttggacgatatgtttatgggtattccaccgatagcttggtattcgtgtatcgcaggtgataaacaacaggcctatttgagcgaagctgtacgtcagatatttcaatttgcagaccgtatgtgggttcccgagaagaaacttttccgtcatggatgggtggaaggtatgcaggatcatcctgctttccattggggacgtgccaatggttgggcgttgttgactatgtgtgaggtattggatgtgttgccggaggattatcctcagcgcgataaaattctagatctgttccgtactcatgtacgtggtcttgctgcatgtcaaagtggtgaaggtttctggcatcagttgctggatcgtaatgattcttatctggaaacttcagccacggctatttatgtatattgctttgcccatgctatcaataaaggatggattgacgctatggcatacggaccggtggcacagttgggatggcatgccgtaacgactcaaatcaatgcggaaggtcaagtagacggaacttgtgtaggaacaggtatggcttttgatccggctttttattattatcgtccggtcaatgtatatgctgcccacggttatggtccggtactttgggcgggtgctgagatgattaatatgctgaacaaacaacatcctaaaatgaatgacagcgccgtgcagtattaccgtacggaacaaaagacttcagaacctattttccatgtaatggatggtggagctaaataagaaaaaaacagaacttaaaaaaaggaggaaaataccatgaaacgtgaagcttttaagatgttcttgaagccgggctttgagaaagagtacgaaaaaagacatgcggctatttggccggaattgaagaaaatgttatctgatggaggagtatatgattactccatttattgggataaggatactaatattctgtttgcctgtcagaagacaaaaggagatgagtcttcgcaagatatgggggccaatcccattgtacagaaatggtgggattatatggcggatatcatggaagtaaatccggataattctccggtaaccatcccgctgcctgaagtcttccacatggactaagataaaaaagagtgtatcgattcattttgatacactctttttttatacctttgcaggcacaacaacactatgatgaatgatatgaaaaaacacatctatactttatgggcattctttattcttttcagtcagagtattgccgcatcagtcgaggtgcgttctactcatatgactacgggagatggagtcgccaataactcaattcgatatatatatcaggatagcaaaggctttatctggatgggaacgttgaatgggcttagtcgttatgacgggaattcgtttgtgacttttcgtcctgagggtggaaataaaatttcgttgatagaccatcggattcgcgatttggaagaagataaaaatggtttcttgtggattgcgacttctgccgagttgtttagttgttatgatctgaagaaagattgctttgttgattttaccggttgtggggaatataaacaactgtatagctataagatgactgaccgtgaaggtaatgtctggttatggcaggatggaaacgggtgtcgtaaagtgacttatatgaatggtgggtttacatctatagttttcaagaaagaaaataataatctcccttctaataatgttacttatatatctgaggatgaacaaggaagaatatggattggtagccatgacggtatagctcaagtggtagaggacaaggcagtattggtggaagaaaatcatgatgcttccaagatgatgtcttttggtaaagatgttttttttctttcgggaacaggaacaatttcgttgaagagagaaggagaggatagccgtattgttactcgtttaggtgaaggtagtaaagtatatagtaccatgcgcttgcaaaacgattggattgtttttacggaagatggcagttatgtcttcaatttgaaaactcatcaggtaagtttggatacggaactgaatataaaaaaaggacaagttcagattgacaaccgggggaatttttggatttataatcatacgggtaaggtatggtatgtcaatgccaagaccagatttgtcaagtctttccaactgattccggctgataaagtaaattatatagatgaggaacgttaccacatagttcatgattctcgtgatatagtttggatttccacttatggtaacggtttgtttgcttatgatttggcaactgatgaattgcagcatttcgaatccaatattaatggattcagtcatatcacttcaaattttttgcaatatattatggaggatcgtgccggtggtatttgggttagttcggaatatacgggtatttctcgtctttcggtcttgaatgaaggagctgagcgtatttttcctgaagatgaaactttatcagaccgttcaaataccgtgcgtatgatcaaccgtatgcctgatgataagatttggttgggtacccgtcgtggaggattgtatatttatgaccctcatttgaaaactatagagagcagtcgttattttgattctaatatttatgctgttgaggaaggggctgatggtagtatttggttggggagccgtggaaacggattgagtattgacggaagatggtacacttatcactcggatgatcctctgtctattggaaataataatatctttactctttaccgggaccgaaagaatagaatgtggataggcacttttggcggtggattgaatttggcggttaaggaaaaggataggtatgtattcaagcggtttttgaacaatttttatagccagcgtcagattcgtgtgatacaggaagacaataatggatggatatgggtgggtactagtgctggggtttacatatttaatcctgattcgttaatgaatgatccggataactatattacttataattataataacggtaagttacgtagtaatgaaataaagtgtatccatcaagatagtaagggtcggatatgggttggtacttcaggaaaaggattcagtatgtgcatgccagaaggtgattacagaaacttgacttttgagcattatgatggaagtgatgggttggtaaatagtatggtgcaatctattgttgaagacagggagggcaaactttgggttgcgacggaatatggtatttctcgttttgatccggatacgcatgcttttgaaaatttctttttttcagcatatgcgttggggaatgtttatagtgagaacagtggttgtgtgagtaaggatggtaaactgatgtttggttctaattatggattagttgttatcactcccggcaaaattgtgaataattctactgtaactcctatggcagcttttaccaatcttcgaattaatggtattgctatgcgtccaggcgatgtggattctccgttagaccgttcgttgatttatacagatgaaattgagttgaaatatttccaaaattcttttgtcatagatttctctacatttgattattccggaacgaatagtactaaatatacgtatcggttagataattatgataaggagtggagtataccgtcttcgttgaattttgcagcttataagaacctggtacccggtacttataaattgcgggtgaaagcttgcaatggggtaggtgtgtggggagataaagaaacgattttgaagattatcgttgttcctcctttttggaaaactacttgggctttctttatttatgctattttgatagggggggcgttatacatcactttcagactgatgcgtgactttaatactttgcgtaatcgtatacaggtggagaaacagctgacagagtataaattagtttttttcacgaatatctctcatgagttccgtactcccttgactttgatacaaggagcattggagaagatacagcgtggtggtaaaatccctaaagaaatggcttattcattgaaggtcatggataaaagtacccagcgtatgttgcgtcttatcaatcagttgctggaattccgtaagatgcagaataataaactggccctttctttagaggaaacggatgtcatggctttcttgtatgaaatttttctgagtttcaatgatgctgctgagtctaagaatatggatttcaagtttttgccatctgtagcctcttataagatgtttatcgataagggttatttggataaagtgacttataatttattgtctaatgctttcaaatatacgcccagtggtggaaaagtgactttttctgtgacggtagatgaagcaaggaaactgttggtcatatcggtagccgattccggtgtaggcattcctaaagagaagcgtaatgagttatttaagcgttttatgcaaagtagtttttcgggtagtagtgtcggagtcggcctgcatttgacacatgaactggtgtgtgtgcataaaggtacgatagtgtatactgaaaatgaaggtggtgggtctatatttacagtcagtttgcctactgatatttttgtttatgaggaaaaagatttcctgattccccataatgtgttgctggaagaggaggaagtacatcatgcggctgttcttgcaggagaaatatcggcgcaagaaggggaagtggaacttccatctgcaccacttaataagcggaaagtacttattatagaagatgataacgatgtacgtgagtttttgaaagaagaagtgggacaatattttgaagttgtggccgaggcggatggtccgtctggattggaacgtgcacgtacgtatgatgctgatttgataatctgtgatgtgttgatgccggggatgacagggtttgaggtaacccgaaaattgaaaaatgattttgatacaagtcatatacctattattttattgacagctatgagttctgccgaaagtcatttggaaggtgtggaaagtggtgcggatgcatatattactaagccttttagcccgaaactactgttggcacgcgctttcaaactaatagagcaacgtgagaaattacgtgagaaattttcgaatgatccgaatatggtacgaccggctatttgtacctctgataaggataaagaatttgctgacagattacaggtggttatggaacaacagattggtaatgctcagtttacgattgatgagtttgcttcgatgatgggattgggacgaaccgttttttatcgtaagatacgtggggtgacgggatattcacccaatgaatatattcggattattcgtatgaagaaggcggcagaactgttgttggaaaatcgttatacggtagctgaagtttcttataaagtaggtattaatgatccgttctattttagtaaatgttttaagcaacaatttggtgtggcaccttctgtttatttgcgtggaaaggaagagtccgggatacaggatacagaaaataaggactgatgaaaaacttttcttaaataagaaggtcaatcgagaataatatagaatagaatcggttgacctttttgctttaatggactatattatttagtatggcttgagactgattttagtcagtactttgcgacttacaatatatagtatccatgtacaagcagaagcggtaagtaatgctgctatttgtcgagtggtgtcagatatatctagaggcagagacgctccaagccaccaacctgccaaggctgcggtaacagtaagtaaggccataatgatgcttactcctaaaatgaacattattcttttcataaatggtttaagtttgattcaatattaaataaatgctatttcaagtcagtttgttcatgattatataaaaaatcgtgagtaaaagggatgtaaattaaaaaaggagtatcctctggaagaggatactccttttttatgtaggaatgataaatcttactgattaactcttttttcctgaattctagctttcttgccagtaagagcacgtaaatagtacaatttagcacgacgaactttaccaactttgttaacagtgatactgtcgatagccggagattcgatagggaaaatacgttcaacacctacagttccagacattttacgaacggtgaaacgttttttgtcaccatgtccagcgattttgataacaacaccacggtacaactgtacacgttccttgctaccttcaacgatacggtatgccactgtaatagtatcaccagctttgaatgaaggatgctgtttgccagtagcaaatgcttcttcagcaattttaattaaatccattttttttgattttaaattgtttatcgttaccaacgcaacatatcaagtaactcttctttgacagcgattgcgcgaaagcggtgcaaaattactagatttttgtcatacagccaaattaaattcaactattttttcatctgatattgttggttgcaacttcttttttaactacatttgggcaataaacaactaataaacatgaaaccaaaccgaattatgtgtatgattccggcaggaatagcagccgggatttttatgttttcaagctgtcactcagggtattcactggcatcagttgagggaaacaggatagaagtgacagcagctttggatgctaacccggattccactgcaatcgctattttgactccgtatcaaaaaacggttgatagtattatgtcaccggtcataggacaaagcgctcgttttatggatcgctttcgtcctgaaagtgagctatccaacttggtagcggatattttacgttgttctgcttctgcatatataggccgcatagccgatgtgggggtgacgaatatgggcggactacgtacggctttgcccgagggggatataacttacggtaatatttatgaaataactccctttgaaaatacattgtgcattgttactatgaatggttctttgctgcgcgaactttttgaaaatatagcagctgtgcatggtgagggattaagtggtgcttgccttgaaatttctggagatggaaaattattggatgctacagtagccggaaaagaaattgaagactccaaagagtataaagtggctaccttggattatttggctgagggaaatgaccatatgactgcttttgctaaagtaggcgatgcggataaattgctgcctgaaaaggccacagtgcgtcagttgtttctgaactatgtgaatgagcagactaaagcagggaagaaaatagactcaaagatagaaggaagaattaccgttaaagaataaacagaaccgtcatgaaacgaatatatgtattatttactgctctgtgtgtatgttgtgtgctggcagcacaggatatcaaagaacttttgatacttcatactaatgatacccatagccgtgtggaacctatttccattactgacccgaatccggagtttgcaggaaaagcgggctttgtacgtcgtgttaccttaatcaaagaaatgcggaaacagaacaaggatttgttattgttcgattgtggtgacttttcacaaggttctcctttttataatatgtttggtggtgaggttgaagtgaagctgatgaatgaaatgggatatgatgccgggactattggaaatcatgaatttgattttggtttggataatatggcacgtctttttaaaatggcggattttcctattgtttgtgctaattatggtgtacagggaactgttttggagggtcttgtcaaaccgtatgttattttggaacgtaagggggtaaaggtaggcgtgttcggactgagtcctgcgttggagggattagtacaggcaaaaaactgtgaaggagtggtttttgaaaatccaatagaggccgcccagcgtgtggcagatatattgaagaatcgggaaaaatgtgatttggtggtttgtttgtctcatttaggatggcaaggaaaaccttattctgatgaaactttgattcctaatactcgtaatattgatattgtcttgggaggtcattcgcattcttattttgataagactttgttttataagaatttggatggcaaagagattccattgcaacaaatgggaaaaaatgctgtttatgtaggagaaatgaaagtaaggatggaaaagaactgatagttgctgttgtatagggaaatctgatataattgagtaagttagatgaggagaaacatattgttatttataagtttatgtgttgtcggatgtgcgatgatgtatgcacagcagatgcctgggctgttacaaaaggggaaggcggacactcaggattgtaaggcgtgggtggatgaacagctttctgaaatgagtttgaaggaaaagataggacaactgtttatacacacagtggctcctcttcagacacaacgaaataaaaacaatatatatgcagctataaaagaatataaagtaggaggattacttttttcgagtggccagttgtctaatcaagttttattaactaattatgcgcagagtctggcagaagtacctttgttcattacttttgatggtgaatgggggctggctatgcgtttgaaaggaactcctcgttttccaagaaacagagttttgggatgtatacaggataatgaactgctttatgaatatggtaaggaagtagctcgccaatgtaaggagataggtgtgcagatcaattttgctccggtggctgatgtggatgttaatcctcggaatccggttattaatacccgttcttttggtggtgatcctcggaatgtggctcaaaaagtggtggcttatgctcgtggtttggaggatggaggggtattgtctgtctgtaaacattttccggggcatggagatacggaagtggattctcataaggcgttaccggttttgaattttgatcgtgcgcgtttggacagcattgaactttttccgtttaaagaggctgttaaagcaggactgggaggtatgatggtagggcatttggaggtacctgaattgggtaaaaatccggcttcgatttcttcacatattatttataatttactttgtcgggaattgggctttcaaggtttggtttttacagatgctttggagatgaaaggtatttcgcaaaatgagaatatatgcgctcaagccttgatagcaggcaatgatttattattggctccccgtaatttgaagagagaattggatggtgttttaaatgctgtaaaaagtggaaaactatcagaagaattgattacggaaaaatgtcgtaaagtattgacttataaatatgttttagggttgaagaataaacctcacgtccaactttccgggctggagaaacgattgaatcgcccggaaacgaaggagttgattctccgcttgcagaaagctgctataacggttcctgctaatgtaagtggaatcttgcctttggattcaaaattgaagggtacggtggttctgaatattgggaaaactcccggtgcagggcttgatttttataatcgtttgcaaaatacactctctctcacacgcgttgttgctcgtccggattcgatggaagctattagaaaacgattgttgggtagtcagcgtgtaattgtggtggttacttcggatgattacaaaaagtataaaacaatgcttgattcgcttccggctgatttgcctgttgtttatgtgtttctgatgccattaaagtctatgttggatatggagggctactggaagaaagcggcggctgtagtattggggcatagtgatgaatctgttattcaggagtatgtggctgatgtcttggtaggaaaggcggtggcagacgggcgtttgtccgtggctgtcgccgatttgttcaaaccgggtgatggagtgactataactcctaaagtgtctcgtatttatagacccgaggattatggtatggactccaaaatactggaaaagatagacgggatagctatggaaggaatcaaagcgaaagcttatcctggttgtcagattctaattttaaaagatgggaaaccagtatatgataagtctttcggtactttcacttatgaaagtgaccaaaaggtggaaaaggatgatttgtatgacttggcttcgttgaccaagaccacggcgacgctgttggctgttatgaaactttacgatgaaggtaaatttggtttgaccgatcgcatatcccaatacattccagctttaaaaggcacggataaggagcgggtcactatagaggagttgcttttacaccagtcgggcattcccgctttttggcctttttataaggaggctatagataaagacagttataaggggactttttacaaagcaagaccggacgctagtcatcatacgcaaatagatgtacggctgtatgtcactgataagttcgattatagaaaagagttgatggcaaaatctttctctgccgattatcctttacaggtagctgacagtatgtttcttcatcgttcttttcgtgattccattatagcacaaataggacgtattccattaaaagacaggagatatcgttacagttgcctgaactttatgttattgaaggaaatggtagagaatatcagtaaaatgcctatgaatctttttttagataaagaattctataaaccgatggagatgaaccgtacggcttatttgccgcttcgacagtttaaaaaggaggaaattgttcctacagtgaaagcggattatttgcgtaaaggaaaagtgttgcaaggttatgtacacgatgaatcagctgctttcatgggaggggtgtcaggaaatgccggtttattttctacggctcgtgatgtggcaaaagtgtatcagttattgattgatggaggagtttataatggaaagcgttatctgagtagggaaacttgtgatttatttctaacccatacttcgaagatcagtaggagaggattgggattcgacaaaccggatgtgaataatagtgtgaaaagtccgtgtacggaagaagcgcctgaagaggtggtaggacatactggttttaccggaacttgcgcttgggcagatccgaaaaatcatttggtttttgtttttctgagtaatcggatttatccgcgtccttttgaccataaacagttgatgcggttaaatatccgtcctcgtatgcaacaggttatgtatcaggctttgatgaaataatcgtatttagattaaatacaaattagcgcatttttgtaatctctatgtgacaactaatagagaaaagctgtatatttgctccatcaattagtactaataatttaataattaacgaaaatggcttacgtaattagtgacgattgtatcgcttgcggtacttgtatcgatgaatgcccggtagaagcaatttctgaaggtgataagtattctatcaatccggatctgtgtacagagtgcggaacttgtgctgatgcttgtccttctgaagctattcatcttggctaagcaatacaattttgttctttaaagttaataacgatcgtttccgttgatggaaacggtcgtttttttgtttttcttaaagctttgtgttgattacaagctcgtatgtctactttatgaataaaaaaaacaggcaccacagaaaaaaacggatgcctgttccttttaaagaaagaatattttattttaatagggctaatgcttctttgatgcggcgcatagcttctataatattctcatcggaagttgcataactcatacggatgcattcgggggaaccgaatgaagtaccacctacacatgccacatgacctacttcaagtagatacattgccaaatcgtcagcgttattgatattgcggtcacctgctgatttgccaaaaaaagaatcacatttcggaaataaatagaatgctccttgaggattgtttacttcaaatcctggaatttcttttgctaattttacaataaggtcacggcggcgctggaatgcctgacgcatttcttctacgggagtttgagtgcctgtataggcagcttcggcagctttctgagaaacagagcacggacctgaggtatattgtccttgtagcttatttacagcttttacaatccattccggaccggcaatgaacccgattctccatcctgtcatagcatatgcttttgaaactccgtttacaataattacattgtcatgaatctcggggaattgggcaatgctttcatgtttgccactgtatgtgatatgttcgtaaatctcatcggctataacatatacttgcgggtgctttgccaaaacagcggccaagccagccaactcttccttggtataaacagaaccggtgggatttgacggtgagcaaagaatcaatgctttggtcttgggagtaatcgctacttctagttgtgcaggggtaatcttgaaatcctgatcaataccggcagtaataataacaggagtaccgtcagctaattttaccatttcaggatagcttacccaatagggagccgggactattacttcgtcaccgttgttaactagagccataatcgtattacaaacagattgtttggcaccgtttgcacaggagatttgtgcagctgtatagtttaatccgttttcattcttcagtttggctacgattgcattgcgaagtgcaggatatcctggaactggagaatatctggaaaagttatcatctactgctttttttgctgcttctttgatgtggtccggggtattgaagtccggttcacccacgcttaaattaatgacatcaactccttgggcttttaactcattacttttttgggacatggccaatgttgctgaaggagacaaacgattcaaacgatctgataattgattcattgctattatttttaatgtgtttaagtttacttgctgcaaaataaaggataatatctcaattatgaaagtaaaacagacgaaatcgcatgaaaaatgatgtgatttcgtctgagttatagcttttttatttgttaaagtgcaatgtatgtcccattctgtcttttttggtttttaaataacgctcgttatatttgttaggcgtgatttcaataggaacgttttcaactatggacaaaccgtatgattccaatcctacacgtttgacagggttatttgtcagcaaacgcatttgggtgacgcctatactgcgtagtatctgtgctccgactccataatcacgttcatctgcctgatgtcctaaaaggatattagcttctacagtatccacaccattttcttgcaatttgtaggctttcattttttccattagtcctatgcctcttccttcttggtttaaataaacaacagcgccttttccttctttttcgatcatttgcaatgctttgtgcagttgttctccacagtcacaacgcatggatccgaaaatatcaccggtggcgcaagaagaatgcacgcgtaccaaaacgggttctccttcttttatgtcaccttttataatagcgatatgttctaaaccattacttttctggcggaaaggtatcagacggaaatggccgtattcagtcggcatgtccacttccacccctttttctactaatgactcttgctttagacgataggcgatcaagtcacggattgaaattagtttcagcccccattcatcggccatttttcttagttcgggcagacgagccatggttccatcctcactcatgatttccattaatgcggcagcagggtagagtcctgctagccgtgccatgtctatacaggcttctgtatgaccggcacgtctcagtacgcctttgtcttgtgcatataatggattgacatgccccggacgtccgaatgtttcgggagtggaggtggggtcggcaagagcgcggatagtggcggcccggtcgtagatagaaactccggtactgcaaccttccagcttatccacagttacagtgaaaggagtacctagaactgacgtgtttgtatctacttgatgaggtaattccaattccttgcaacgagaaatagtgataggtacacaaagtacgccacgcgcatgtttcagcatgaaattgacttgttcgggagtaattttttccgcagcaacaattaaatcgccttcattttcacggtcttcgtcgtccactacaatgacaaacttaccttcacggaagtcagctatcgcttcttcgatggtatttagttttaattcttccatagtcaaattataaatgatttattgtttattctttcttgaatttcacggttggtcttgattatgttttttaaatctttatccagccggatactgaaccgccaaatgcggaaatagaagaataggcctattggtacaatgattcctgcgagtaaattcagccattggttgtcaaacggacttttgtgagctttggtggacaaaatgggatatctatttaagtattccagtaatactccatctttgctgttggataattcttctatgagtagttccattttggcgctgatatcggctatgatgtcatcatgtcctttgttggtgaagatgcggatataattaggtgcgtcggccagtctatgcttgatggcatactcgttacagatgttgcatagtttctccagttctgtttgtatgcgtggatagtccggatcttctataataacttcttttttgaatacatggcgcgaggggcgcagacctaacagcatacggaagaaattgatatatacttcggcattgaataccactgagtcattattcgacttataagtaaagaaggctccgataggtgccaatacaatggtactcatccaaacacctaataccatattcatttcaccgctttttgctactcgggtagccccggaatcaatgatataatagattacgaaaatcaagacggataccactacgggcattcctaaacctcctttgcggatgatggctcccaaaggcgcaccgatgaaaaagaaaatcaaacaacttatagagagggtgatttttttgtgccagtcggcttcgtgttttcggatattgttgtccgcatctgtagtttgataacttttcatgttccattcactggccagtgactcggtgcgatccgccgcactacccagtgtcttatctttttcagctaaagtataggaattgaatagactgtctacattgattttgctgtttgtttcaactatttttgcggagtctgttttcgataatatgatattgcgataagtcgaggcttttatttcattgtacatgcttcttcccaaactgtcggcgcggtggctcagcgagtcgatggactggctgatttcaatcatattcttgctgtccgaacggtcacttaaaaaactcccatctaccatgttgaatccgccgtcaaattcaataatggtatgtttctctctgaaggtttcacgtcgataggggacattattggatgaaatggtctgcgatttcagattttcgaactgttctccgttatacagatgtaggtaaagatgttgtttgtctgctgtcatctccatttttccttcggaagcccatataatgtgagcgttttcaaacccatctgaaaagttgtagatcagtacatcttttagcattcctgtttcacggtctttctgttttacatatatattatacccctcaatttcgtcgtaaaatacaccttccggaatatccagttctggtgaagtttgcttcatggatacaagtaaagtaagcaatttgatctgcgctttgggggctatgacattttgaaaataaaacgaggtacaacacaggaaagtacaaaaaataatcagtggacgtatgatcctcaataagggaatacccgctgctttcatagacagcaattcatatctttcaccaaagttaccaaatgtcattaaggcggctaataaaattgccaaaggtagggacaaaggtattaaggtcagagcagaataaaagaaaaactgtgctaaaacactcatctccaatccttttccgaccaactcgtctacatatctccataaaaattgcatcatgaagatgaagagacagatgaaaaaagtacctataaagagcatcaaaaagctctttaggataaatatatctaatttttttatgcgtagcattatttcattttgtgcaactatcaaggcacaaaattagcataaaaaacggagagcaaagacaagttttgcatatttttatagaattacagtccgcttaccctttttagcttttctatttcggaatcccaaagttctttcatatcttctacttcatcgggttctgcccaatcaatcacttccagcatatagtcagaggtcagttcgttatagaccattttcaattcaaaataggctttaggatcttcatcatccagccatcgaaagcgtataaaactgttaacccggaagtttgttacttcagcttgccgtgtttctgtttttccccaataaaaggtgaatactttgtctttgaatgtcaccttgtctgcaaaccatgtttccaggccggatggggtactaataatagaccatacaatattaccggatccggctttcaacatgtactccaaacgaattttttcttttcccataggttagctttttaaagtttcggtggcaaattaagccaaattttcttatttgccataataaatgctatgttttttgaaatatttattagccacatactaagctgtttttctctttaaaaacgaattttacaagaaaaagttctctgaaatgttgcaatattcaaaataaccttctatctttgcacccgcaattgagaaacgatggcgggatagctcagctggttagagcgcatgattcataatcatgaggtccccagttcaatcctgggtcccgctacaatgagcaatattagactgttgagaggcttccactcttggcggtctttttaaaaacgatggcgggatagctcagctggttagagcgcatgattcataatcatgaggtccccggttcaatcccgggtcccgctacacaaaacaaggtatttatgagtttgtttcatggatgtcttgtttttcttttattttatgtggacttatttttcttctcataaagaatcacatttgaataattttatgtagatttgctactcatatcaatcaaagttgtaacttttgctgaattatgaaaaacgcattctatatggaagggaatttatggctatatagattatatctttgggtggcaattttattatggctacctgtatccttaccggccgttgaccttccgaatttaacttttcgtactattactatttcagacggcctgtctaacaatattattaatactatttataaagataaaagaggctttacttggttgggcacccagaccggattagatcgttttgacggtatcaatgtgaaaagttttcttcagttttcaggacgtaccattttttccatagccgaaacagattctgtttatttgtgggtgggtacagataaaggattatggagacttgataggaaaacagaccaagtgaaattggtcactttggatacaaagtcgttggaagttagatcagtatttgtaagccagacagggcgattactggttggaacaactcacggactttttatctatcaggagaatactttcaggaaggtgcttttcggatcaaatgctttgtcttctactaattttctcactggcattgttgaaggacataaagatactttttggctgacttcacaaggtggtttgatagaatataatattgtaactggtcaatcggaagtctatacatatcagggtgatgagaggtttgttaattatttttcttgtctgactcttttaaaagaaaagctatatttaggaacagccggcaatggtatgcttgtttttgatatcggtaagacggctttttctatttgtcctgaagtggaaaatggatatataaaaagtatcattgctgttaatgatgagatatgggtgggaacaaatggaagcggtattagaataatcagtgcgtctacaggaaaagagttgtcggctatagagcatacttcgaatgcggatgctatttgttctaatgcagtttattctttgttgaaagaggatgatatgctttttgtaggtacttacatgggcggattaagttatactccggctcatggaagtttcttttctgtttattcttatccagagctttttaattcttataatatgaatgtacgtgctttttgggtggatgcagatgggaaaaaagtaataggcacgcgtgacggactttattatatttctgaaatggaacgaaggataaggcattatacacaccggaattccattttgcgttcggatataattttgtctgtaaaacctttcaatcgggattttttaattggaacttatggagggggcttgtacttgcttcacaggaatacgggtgaactttcctttcttcaatcagatcaatgttttatgcaagggtcatttaatggatatgaaagggatgtaaataataaattatggatcggcagttccaaaggtgtgtatgtatatgatcatttgacaggggaatatgaggtttataacagtcgtaattcttctttgtcggttaattctgttttttcattgaaggcagattcgaagggcaggatgtggctgggcacgggaggagccgtttttatgtatgatagggttgatggagtatttaaatcggatgtttttccggaacatgttttgccatatactaaaagtgtacggttcatttatgaggataaaaagaagaatttgtggttttgtgatgataaggagggggtggttaaggtagatgagtcttttacgacatttgaacacatcacgatcgatgatttcttaccgaataattctgtgatgagcatagtggaagatcctaagaatggcggattatggtttgctactcagagggggttactatatataaaggaagaggaaaattatcataagattttttcgttatacgatggcattcccggatatatttttaattctccggtacagataacggatgataatacggtttggtggggaaatgaacgaggattggtctgttatgatgcagtaaagagctggagtgagataggaacaaaaaggtccagcctcccgtgattacttccatttcagtcgcaggcagacctttgtgcccgggagagacattaatgcccgtttctgctccatttatagatgaggtgtttctgtctgtaaatgataataatatttcattcactttctcagccttgaattatgcagtggagaatacggatttatacgagtattgtttggaagaatatgataaggaatggaaaactttgatgaaaggaaatcaggtttcttatacagaacttcctgttggcgattatatgtttagggtcagggcggcttccaatcctgcagcaataaaagcggtaagggtggttgttgccggaaatacgccttttataagatggattgtggtgttaagtgtagtcgtttgttgtattcttatttatttttactccgggttattggggaagtatcgcacaatgaaggaatatataaataaaaagacggaaccatccgaagaaaaccggaaagaaaaatatcaaaaatcaaggatggaagagaaaacggccatgctcattattgggaaactgaatgagtgtatggaaaaagatcggttatatttgaatcctgatttaaagttgcaggatgtggcaaaagtggtgaaatgtaatactggagagttgtcccaagtgctgaatatgtttatgaatattggtttcacggattatgttaataaatataggatagacgaattcataaaaagaatacaggataagtctgcctccagatataccttggtttctttgtcggaacaatgtggtttcagttcccgtacttctttttttcgttcgtttaagaagtttaagggaatgtcacctgccgaatatataaaggaacatgggatatttataaagtagcgtttggaataggggtgttactctagtgattggatagaagaagagagtttcatatttttttgaaactctctttcttgttgtgtaatttgttgattcatagtgttgtatggtctttttgtttcatctagtaggttgggattaatcctactttacaagatggttgaaaagacatttcagtttctaattttgctgatagaaaaatatttttatccattaaagaaactgatacgattatgaaaagcagaactttttttactcttgtttttatctttttagttagcataggatgtttttcgtgtaaaacgactgctactgatgattttcctgttgattcggaaattgcgtattgccggtctcaggctatgcggacgctggtttctattccttcgttagataaaattcctaattctatggatttagatagtattaaatggcgttatacacaggcaggctcttggacttgtggattttggcctggtatcctttggtatttatatgaggatactaaggataatatgtggagggaagcagcaggaaaagtaaccgatatgattgctcccttggcttacaggaaagcaaagagtcatgattccggttttattatgatgtgtagtttgggcaacggttatcgtttgacaggaaaaccggaatataaggaaggattgctgcatgccgcagattctttggctatgctttataatcctgttgtgggtactattttatcttggcctggaatggtgaaaaaggaaaactggccgcacaatactattattgataatatgatgaatttggaacttttgttttgggctgcgcggaatggaggggggcagtatttgtatgacattgcctgtaaacatgcggaaacgactatgaaacatcaattccgtaaagattattcatgttatcatgtagcggtgtatgatacgctggatggtcattttataaaaggagttacccatcaaggattgagtgatgattctatgtgggcccgtggacaggcatgggctatttatggatataccatggtatatcgtgaaacacatgatgtgcgttttttggattttgctcggaaggtatcggatgtctatttgtcccgtcttcctgaggacatgattccttattgggattttaatgctccggaattatcctcaggtgaaccgaaagatgcatcggcttctgccataacagcctctgctttattggaactttctacctatataaatgatagtgattctgcatttttctatcggaataaggctgtggaaatgcttcagatactatcctctccggcataccaggctcgaaataaaaaagatgcttttttattgcattcggttgggcacatgaacaagggatgggaagttgatgcttctattagttatgcagattactattatttggaagcattggtacgattgaaacgtttgaaagagaaacaatctgttttggctaatttataaaaccattgttaatccatctatattatgaatacacaatctgttaataccagtctttatcaaaaaggggatatctccttggagagaatttatggaaaatataggaatagttttattagatatgccggaaaagtgctatctgatgaattttatgcggaagatgtagtgcaggatgtatttacaggattgtttcagcaaacaaattattttgtgtctgaaatggctgcattaaaatgtatttatattgctatctataatcgtagtattgatatgttgcgtcataaacagattgtgcagcattatgaaactgcacatagtgataaaaaaagggaagaagtcagtattggtgaatataatgagttgcttactaaagaattttttataatagttgaaaatggaatagatactttaccacctaaatgtaaacagatatttgtaatgaaaagtagaaaatcactttcgaattcagaaataagtaatcttttaggtctgtctcttcgtacggttgaaaaccaggtttatattgcccgtaatgtattacgaaaatatattgactcttatttatgctcttaaattgatgataatatgaaaagactatttttaggaattttagcaatatgttgggttattggtgtgaaggcgcaagaagtgttctcacctgatgataaaattaatgtgcgattcttcttgtcggaaaaagtatctttaataatacaagtgactgacgggctgcttccaatgatacagcctgatgttccttgctatggacgatttgttccgcttgtttaccattaccccgatagggattgtcaaataatcccagccagaatttgacacgaagtatctcggctacccgtttgtcaagagtttcctgagagattttaccgtcggcaacagctttacgaagaggcaagataaaatcagcaggcggagtgaaatgggtacggatattcagtcctgcattgacagcctgcgctattccgtcttcgtatgtattcgccactttatgtttactggagataaattccacagcttcactgtccgatacgacatatcctttaaatccccattcctgacgtaatatttcagtcaggaaatgataacttcccgtaatgggctctccgtcatagtcattataagaactcatcactcccaatgctccggcttcttgaaatgccatccggaaaggttctatatataaggtacgcatttctcgtggagctacgtgtggatcagtccgcgtctttccgtcacgcccacctaccggaatgctataaactgcaaaatgctttggagtagccaccaggttatgtttttgcagactggtaatcatttgttttcccagttctcctactaaataaggatcttctccgtatgtttccacgcatcttccccagcgaggatcttgggcgatatcaaggataggagaatagatattggtataccccagcgttacagcttctttggcttccacttcaccgatacgggctatcagctctttattccaagtagcgccctgtccgcattgggcggggaaataagttgcccggtcatgacataatccgcgaataccttcattggtgaaatctacggggatgcctaaacgtgtttcttctacaaaccagcgttgaatggcatgcttggcatccacatgtttggtgtagggaaaagaatattcggacttgaaagttcccagtccgttatgttcttcatctatgttccctattccgtctttccatacctctgttttccaattgtcttggggcagggcatctttcagtacacgtcctgaaccatagagggtagccatctggcaacttttttcttccaatgtcatttgtgagagcaagtcttgtaccctctcttccagtggggctttaggattttcatatagatccatttttccattcttgttgaaatctatccatcctttgtgataaattccatccggcgtatctcctgatacttgtgtacaaaacaggaaagaggctactgtaaataaagtgtgtttattcatgttatctaggttttgtatatatgcttaatacgtacaaagatagaattttactcatctctccggaagatattcataactaaagttgagtgtttcttgattgtgattcgtctttgtaataaaagtgaagataactatgaaacatgtatttttatttggaatattcggttggttcttatcatttacgcttgtcgcacaaacaggaatctggcaatggtctgtacctgttcgtaattttagcattcatcccaaaaattctgagtcaagggcttacttgtggattcccgggcagtgtgaacaagtaaaagcaatcttggttgcccaacacaatatggaggaaatctccatccttgaagatgaggctttccgacagcgtatggctgaacttggtgtcgcccaaatatgggtatgtccttctttcaatcatggatttgattttacggatggggcatgggaaactttggatggtcttttggcagatcttgctgaagtatctggatataaagagttgtctacagctcctttaatagccataggacattcggcagctgctagttggccttattatcttgctgcctataaaccggaacgtacattggcatgtatttctgtcagtggtcagtggccatatcatcgtgatcgctggctatgtccggatatttggggagaacgtaacatcaataaaattccttgtctggaaaccatgggagaatatgaatcagcacatacatggagcaatgaaggtttgaaagaacgtaaggagcatccattgctgcctttaagcatgttggcctgtcctgctgaaggacactttgcctatactccggaaaaagcacaatatatagctctctatatcaagaaggcaatgcattatggacacgtagatccgacaaaggagggatggttgatggagcgatggaaaaaaaatgaaaagccttcatgtattccggcaccggtaaatcaatttaaaggggatcctgcacaagcattttggttttttgatcgtgagatgatagaggctactttggcgtatcaatcccgatattacgatatgaagccacaattggtaagtgtgtctcaaaacggaaaaacagtatcccaacagaatactcatttacaagttcacccggcttttataccacaggaagatggtatcacatttcaattgacccctgtttttttggatactgttccaggagaaagtccccgactttccaattggactgatttgcctgttggggcatctattggtcatgctggaaaagctccggtcctgcagatgattaccggcccagttgttttagttgattctgtgacatttcgaatacaatggaatcggggaactttatggacggacaagaaatcggatattgttttttcaataactcatccgggagatgaagaatataaaccggctgttctgcaagctcagatgataattccggttaaaaatacggaaggacagcagcaatatattaagtttgcaacgttaccggacataaagcgtggtactaagtacgtttctttatctgctgtttccagttgtggcttgccggtc

SEQ ID NO: 14416 - DNA, 1091 bp, Unknown
  gut microbiota DNA sequence
ggagaatttgtgttccttgtactcatctaacttctgctccttgcggatgaagtgcggcacgaggctgacatttccctcaccgtccttcttgaaggagaggcgggcgtccagctcgaatgattcgccgccgaaggtgggcttgacctttaccaagtcggacttgccgtagtggagcatcttcgtaaggtctccggacttttcaaggtcgtcacgcttcacgccccatctgtcctccagctcctgccagttgattttgctctcgttgatgggttggtagccctgtctgccctgcgtctgttgcgggctttcctgctgttctttctgttgttccatgttttcctgtttttgaggttcttgtttctctgtcttttgtgccgccatctcttcctgcacctgctgttgataagggaaggtgtcgattttgtgcggtgcaaggatttgtttgttctggtacggatgctgaagcaggtctttcatcacgccaagcatggaatccacttggtctgccgcgatgcggtagaaaccgaagcggctgggttccttgcactgccggaagaagttcttgaagaagttgtccagcacgtcgccgtgtcggtcgaattgcaggaaactctgcgcgttctcagctttcgcaggggtacgcttgggtgtgccgtctgcattcagcccggctaccacgctgatctcgcccgtcttctcatcacggactaccagcacgtccttttcgtcttttttctttgccatttgaaaaatgttttaatgggttatttatgaaagaaattatggatacgagccttgtagaaggctatatcttcttttttgaagtccttgatatggttggaaaggaatgtcagcacatcctcctcgctgtaataggttttcttgcccagtgtcttgtagggcaatgcgccgacactgcggtagcgttgcagtgtgcgcttgcttatctggagcagcatgcacaaatcctgattgtcgaaaaggcggatgctttccgtgatagtaggctgtttcccctcagccttcatcgccagcagcagttcgtcctgacggtcgagccgttccatcagcttctgcatccagccctcgaa

SEQ ID NO: 14417 - DNA, 52496 bp, Unknown
  gut microbiota DNA sequence
cggatacgcatatcgctgaatgtgcgtgaatggttagagtccaattcaatattaaaaacggtctggatatagttaaaaagttttgccaaaggaatatcaccaaagactttacggctatcccaagcgtaaatctgttcataaagttctgtttttgttgcaacccacgtgatacggacgcgaggtaaagattgttctaaccggcgattttccaatgcttcaagttccttattcagatataccatcaacatctcgttagctttcagcctggcgaccttgaaatcacaattagtagaaaacatcggatcacgttcgtaatggaacgattccagataaagagccgtgtcgatacgtcctcgcaaatagtagattgaatccaaatgcgtcaagcctgaacggtaataacgcacgaaatccgagcgttttgtgttgtaacgattgatagccttgatttcatcaatcagataagcccgctgtgaatctactcctaccggacgattcatttcgatattatagaccttacgatagtaaagcaatcggtaaaacaaacgaggttttatttctttgaagaattctatttcttccgcttcatctttgaatgtataggaacctataaactcttttacctgttgaaaagcattagccaatacttgtgaggcttcaagagatttcttcatgatattcaagtctgcggactcgattttcttcaatttcttttcaatctctttttcgagattattgataaactcattcatttctaatttagaactttatgatgtttagactgttttacaatcaaaatgctaatctcatacaatacccacatcggcaatgcaaccagcgagagcgtgaacacgtccgatgtcggggtaataaccgcagcgattacgagaacaatcacgacggcgtgtttccgatagtggcgcatgaaatccgctgaaaaaaaaaccaacttggtgaacagccacgatagtatcggaatatcgaaaacaatgcccattgcaagacacatcattacaagtgtcgagatatacgaatcgagtgcgatcagattatccacctcgccgctcacctgataagttcctaaaaagcggaatgtcagcggaaagatcaaaaagtcgctgacgagtacccccagagagaacatcgcataaccgcctccgaccatccgcactacatatcgtcgttcattatcatagagtgccggggaaacgaaccggaacaactggtagagaatataaggcgaagcgcacagtactccggcacataaggctgtcttcatgtggatgatgaactgctgcgccagccccgtattgataagccgtacggaaaacggttccaccgcacctcccgccctaccgccatgcggtcgagcagccggtaggtaacgaatccgtcgtctttcggtgcaagtacgatggcgaacaattcttccttgaaacagaacgccgcgatgccgaacacgacggctacggcgacaatcttcacgattgccacccgcagcacatctaaatgttcccagcaaagattgtgtgtgcgtccccgttaccatcggttatttcttttgctcggtatcctcaatctctttttccacgctgttcatcccctctttgaaggaacgcacgcccttaccgattcccttcattagttcggggatttttttgccgccgaaaaacagcaatactaccaatacgatcagtagcacttcctgcataccgataccgccgataaatagtggtgtcatcatcattattatttgcgaattaccccgtttatcatttcaaagatttcattttcatcaagttccgtatcgcaaggaatacagccgacttgttcacggttgattatgccatcgtaatacatatccaccccgaaatcggaaaacaacgctaccagcttcctcgaagattcctctatggaagaatcgaaaccgaatacgtcgagatagtattttccgacatcctccgcatggcgttttcccatcgcttcgaggaatctcggaaaaatagacgtcaggcttctacggtaagaactgccgaataacttttccggaagaaattccaactcgtaaatgtcgtatgcgtaagcctcctcttttcctatgcctattctggacgaagtggaaagagatgcgcccatcataataatacctcttgcatcaaggtcattcggatttttcagtaaagtcttcgtcgcttcgagtacgtttttgatataagaaattcctgcatcgtaggacatccggtttttgtcgcccaaaatacacgccgatagttgaaccagtgtaacaagtcccgtatatgcggtcatctctttgtctaaagtcagggaatatttgggacaaagaatagcatagtcggccggtatgccgtatgccgttccgaaatcgtccgtcttcgaatcgacggatacagccccaagtccattctccgaaccgctggacggataggtcggtatcaatacgagcggcagtcgttgcagcccgtaagaaggtttccctttcaggtaatcccacaaatcggattcatggtaaaagccgaaagccatcaatttggcactatccatcacacttgcgcctccggctccgacaatcagggttacgccgttggacttggcaaaccggataccctcttgtattttggaaaattcccttgaaaaagctccatattccacaaaaggaatattggcatcggtcaatgttcggactatatcatcgtagcacccgtttcgttttacggaaccgctaccgtaaacaaacatcactttatgccctttagtcacttctgcgatagtctcccgtatatcattacgaaagagcagtttcgtatcgtttctgaaaataaaatctttcattataatgtctcttgtttaagttgttccacaaagaagttgattcgctgcatttgtgccgggatattgatgctttgcgggcaatggtgtacgcattggtcgcagccgatgcaatggtcggcctgccgcagtttcggcacggaacggtcgtagccgacgagaaacacccgtcgggctttctgataattctcgtcctgcgaagagacgggaacattcccttcgttgatgcacttgttgtaatgtgcgaatatggcaggaatgtccagtccgtatggacaaggcatacaatattggcaggcggtacagggaaccgacgggtatttcagcatggtctgcgccgtatcttccaagagtgccaactcctcttccgtacaaggatcgagcggcgagaaagtacggatattgtcctgcaaatgttccatataggtcatgccgctcaatacggtcaatacctttggaaatgaacccgcaaaacgaaatgcccacgaagcgatactcgcttccgggcgacgctgtttaagcctgccgttcaggtagttggtcagcgtggtaagtctgccgcccaacagcggctccataacaatagtcggtatatcacgtttttccaactcggcatagaggtattccgcgttgaaattcatacctgaagcgtgccggtagtccacatagttcagttggatctgcacgaaatcccatttgaactcatcgtgtcgggagagcaggtaatcgaacactttcacatctccgtggtaggaaaagcccaaatgccggatacgtcccgcttcccgttctttaagcagaaagtcgagcagtccgttatcgaaaaaacgctccatcaaaaagggcataccactcccaatacccacgatatggagcaggtaataatcgaagtaatcggtctgcaagtcctcgaacgaccggcgatacatctttactgaagcatcgaacagctcttcgggagacagcccttgcccggccagacggtggttcgacatctttgttgccagataatacgaattacgcggatggcgcttcaatgctgttccggtggctttctctgaaagcccgcgacaatagggaggagccgtatcgaaataattcactccgtgtgcaagtgcataatctaccagcctattgactgtttcttggtcgataacttctccggttccatccagcgacggcatcataggccagcgcatacagccataaccgagtagcgaaatctgctttttcgttttcggagcggtgcgataggtcatcttatcggtcgggacttcgcctcgtgcgcggcctccggttccagcatcccgaaaggaacatcccgcaaccgtcgttgcagacaccgcagtaactccggctcccaaccgcttcaggaactcacgccggtctatcctatgtttatcttttttctccatacagttatctgttttatatgattctatgggcttcgtgtccctcgacgtaaatggcactgaacggacgtgccggacacagattttcacacgcgccgcacccgatgcaccgttcggtatccaccatcggtatcaagggcgaaaagtcatcgtcggggatggagggtatcatcgagattgcccccgtcggacaatgtcttgcgcaattttcgcattgtacgccgtctgtcaggacaacgcaattctcctttacccatacggcatggccgatctgtatagctgacttttcttcggtcgaaacccgtcggatcgctccggccgggcaaacttccgaacatttcgtacattcgggacgacaataaccgcgctcataagaagattccggctgcataagcgtttccaaccgagaggaagggcgcagcaccccgttcgggcagaccgacacgcatagctggcagcccgtgcaatggcgattcatattacgcagactacctgctccgggaggagcgagaggagtcgtgcgcctcggaattttcttgtcgagaataacagccagcccgccgtccacattcttttcctgcgctttggccgcagccgtaccgagaagaagagcaactccggtgaggaaatggcgtcgggaaggattctgttcctctgttttagatgattgcacggctgtccgttcccgtcgtcgggtataagagatggccccgtgtttgcaggtatcgagacaatccatgcaagccacacaacgcgaacggtctatctcgtgattcttgtagtctatacaagacgccttgcattttcgggcgcacaaactgcacgaggtgcatttcttgggatcaatgaccggacgtaaaagtgcatatttcgagagcaaaccaagtacagtacctaccggacaaactgtattgcagtaggtgcgtccgttacgccatgccaagacaaataacaggatacaagtaacaatggctataatgaatgtcggcaggcttctcatacagacctccgtttcataaaaggtgtaactttcggctctctcggcaaggtaggccaagaggttgtttccccatccgtagaacggagccagtaaattctggacaatccgaccgtaggcactgtatggagctatcaaggcgaccagcgaacttgcgcctgctgctattgccacgaggaaaagagccaatacaccgtacctgattccggattttgccggagaataggaaaaacggtttttcccttttttacgccgactgcctacccacgaaacaatatcctgcatgacacccagcgggcagatgacggagcaataaatgcgaccgaaaagcagcgtcagcacaacgagcagagccacgacacctacattcaaggccagcagagcaggtaagaattgtatttttgccatccatcccatccatgtatgccaccctcccgtgaagtcgagaaacagcaacgtgacagacacaaaaaagatgattgccagtatagcccttattttccgtaacatagctatcatttaagggttttcatatctatcacatacctgaattttacatctccatccacgaccttctgataggcttcagtaatcgtttttccgtctgccggaataatttcgacttcgggatagatgccgttggcgaccgaatagtccaacatctcctgcgtctccttgattcccccaatctgggaaccgaaaatcttgcggttggagttcatcacgatggcgtttaccggaatactcggcatattggccgccgagggaattccgacgatagcgagctgaccgtccagcttcaacattttcacatacattaccggatcatacttggcgggaatggtggagagaatgaaatcatattgcttgttcaacccttgcaattcatcgctgttgttcacattgacataacgggtagcccccatgcgtgcggcatccgcacgttttgcttccgttacatcgaatacggtcacatcggctcccaatttcacaagatactgcacggccaagtgtcccaacccaccgaatccggcgacaccgaccttgtcacctttcttgacacctacattacggataggcgaataagtcgtgattccggcgcagagcagcggcgcgactttctcgatttcggcatttgccggaatcttgatggcgaagtcttccgctacaacgtagttgtctgaataaccgccctgcgtcggttcattaccgttatagcggtctatgtcgtggtaggtcatgatggccccttcctcgcaatactgctccagatcatgctcacaagcctcgcaatgacggcatgaaccgatcatgcacccgataccggcatagtcgcctaccttgaatttcgtgacgttgcggcctactttcaccacacgtccggcaatctcgtgtccgggaaccatcgggtatttttcaggcccccaatcctcgcggacatggtggatgtcgctatgacagatacccgcatagagaatttcaatctggatttcattatcaccgacagcgtggcgggtaaatgcgtatggtttgaactgaccgtcgttcttgaaaacggcgaatcctttggtcggcacacctccgacaccttgtgccgaggctgccattgtgcatactgtacacatgattgctaaaatgatatttcgtttcatattgatattattgcttgttctcattggtgttattggatgatatggatgtcacgcagccaactttctacgccaccgcccgtataggtacgcagatgaaccgaagcgggcgtcacctcatgaatcttgtcgatggattgctggagatactctgtcgagccgtaagtaaagaacgggataacgatcttgccgtcgaggtcgtagttttcgaggaacgtacagacgaccatcgccggattgtgccaccatatcggcgaaccgacaaaaatcacatcgtattcgtcgatattttcaggcaaattgccgacgccgggacgcaggttgttgtacgattcgttctgaatacggtcgctgtcgtcatagggattcgaggcataaggttcagacgcctcgatgcgataaacatccgcaccggtcgccgccacaatctcctcggctctccgctgggtattgcccgtagtggaaaagtaagccactaaaattttgcggctaccatcatattcgatctcatcggaaggataatccgcatcgaaatcatccttgtcacacgcgcttaccagcgttattacagccagtgccataaatacataataaaaaaatgttcgtttcataatcctatcgtttttgaagttattgtctattagctcttataatgtcattcagtgaaatatccggatggcggtatcgcgcatcgggatttttctctcccgcacggagtgtgatggctttttgcggacaattctgaacgcaggagaggcaatattcacaggctcctttgcattgaacaccttcacccgtcaaggtatagttccggcgcgggcatacctttacacagattccacagccgatacagttttccttgatgacaagcaacttttcggcggaaggggaaagagtgtgtcccgcacgttgcatgaactcggcgtgctgctgtcgttcctcttcggtaacgggttgtatccagtgcttgcgtgcctgtatgtcctgcatgatttcggctatttgcttgtcttcctgcttgtcgatttttacctgttcattcatatcgaatgacgggagaaagttatccaccattttcagggtggtgatatagtcgaagtgcgtcccgttttctgttgccagattgttccacaattcggtcgcactgcacttgcggttgccgtaggtaaggatggaaaacagataaggggcttttagtttggcctttcggataaactcctgcaccatttgcggggcaagatgtccgtaaatggggtaaacgatacctatttcatccgcctcgaactccagcttgtcctgcctgataatctgcggaatactcaacggattttccgcgaatttccgagccacatagaggcagtttccagttaataccaaacgtctctttttcttttccgtacaggacgtgatagaggagagcccggatgcgctcaatgccaaccctgccaatgtagttcccatacatttgagagcttctcttctggttattttttcattgttcatattcgtattaaaactacttgtaattcatatctttatctgatgcaaaattacgtcagaccagcaaggaagaccttatatgaattacggattggcgtataattattacagattgggagcggagaatataaaaatcgggatacagtgagaaaatacgtccattttccataattttgcatcatgatagaaatcaatcgcttaaataaatattttgaatccttgtcggggactgacaagctatctattccttctaaaacgattttattggaggaagggaaagttgccgacaggttattcttcattcacaaaggtgctttacgcttgtttttctataatgaaggaaaagacataacttttcaatttttcttcgaaggagatttcgtagcttcatttgatagtttgtataaacgcaagccaagtcttttttcgttagagagcatcgagcaaaccgaagtctttgccattaaaagagaagatttttacagtcttatggagcaaacccctttattaaaaagagaatatgaggaaaaactgatagagcgatttcatgtttaccagcaattgttcctttcccgtataaaaaacacaccacagcaacggtatgaagagttactaagagaatatcccggtattatccagcgagttccacaacattatatagcttcttatcttggcatcactcccgtatctttatctcgaatcagaaacagacgataatccatttctttacaattgttatcgtaacatcatgataaaatccgtgatctttgcatacaaaaatcagtaaattgaaaaagatgaaacggatctttatgatagattgggggttgctaccttcatttattttgtcagtatataccggaattgagttgcacgttgcaggacatggaaacaatcatgaaatatggcacgattgggcgatatttcatgtaattgtaagtttgttacttcttatacttatagtgctccacataataactcatagaaattggtataaagggattgccagacgaggagtaggaaagaaaaacaaagttacgttatgtctgtctatcgtgtttgctcttgtcgttattacaggatttatattgttgggtgtagatggagcgaataccacgatgggattatggcattataaaaccggtatcttgatgggcgtactttctatctgccatattcttaaacggttctcagttctatataaaacatcaacacttcataagtttttataagcaagttacccggccggaagtctggtcgggtaacttattggataggtttgaaccgttatcacttattcggtcattccgatttttttcagccagttcaatacattgggtttcgcttcgctgacacggtcacggggaattgcgtaaccatccaacacggaggctttaggctccaactcccgtatggtcttgatggcatccgagaaacggctgccgccatgcgtacagaacgggataagggtcttgctgccgaagtcgtattcgtcgaagaacgagtagagcggcatcggcatatcgtaccaccagttggggaatccgacgaagaccacatcgtagtcattgagatttttgatgtgtgtagccagcttcggacgggcattgttgtctatctcgacctttgccgcatcgatcaatgccttatgcgagccgggataggtgtgtacggtctttatctcgaaaaggtcgctgcccgtagcttcactgatgacggatgcgatgtattgcgtattccccattactttaccattggaaacaaggcggctggctccggaagaagcatccactccatccgtttcgggaacggagaaataaactaccaacgattttcctttagcactttgagaggtagattttacttgttgtccggatagggattgcgctacatttgtactctccgatacggtctcgttcccggcagcccaacaataggccgttatcgtacaagcaatgattgccagtacactcattgttataattccttttttcattctttacttgttctataagtctattcaataattccaattcgacgcaaccagccttccgtaccgtttgcactgcccggcatatcaatacccgcatcgtcgggacgccccggcgtcgtaatgtcgtccgcatcgaggtcttcgggaagtgtttccggaatatgctttgagccaggtgttaccttataaattttctgcatggattcgttcagataggtagtagctccataggtaaagaacggaatgacaaccttatctttcaagtcgtatgcttcgaggaacgtgcagactaccatcgcaggttgatgccaccaacaaggcgaaccgacgaaaatcgtatcatatttcgcaatcgtttcctcatcaagcaggttcgccactccgggacgcaggtcgttgtaggcttcacgctggatgcggtcgctgtcatcgtaaggatttgcggcatacggttcggcagcctcaatccgatggatgtcagcacccgtaagctccacgattcgttccgctacggccccggtatgtccttcagcggagaagtaaaccacaagcatattgccgttcccggacggagtattgggttcatctgggttagtcggattttcaaaatcatcgggatttccttcatcgcccggttcttcgggagtggagggttgctccgttggcgacataggatcatcatcgggagaacaagcggccatagtcgtcagagaaaggagcaagagtggaataaaaagtaactttttcatattcaatctgttctttgatgtttatttattgttatactctttttcggttacgggagcataccactgggtagtacccaaatgaacctttgtattgattgctatatgcgtgaatccgctgtcggaagccgccccgtgccaatgcaccacgtctgccggaatagcgaccacgtcaccgggattcaaaacttgtatgggtttccccttttcctgatagtaaccttttccggcagtggcgatcagaatctggccgcccggatgcgagtgccaactgtttcgggctttcggctcgaatatcacgtcggacactactacatcgaatgtttcactgtcggtcatcaaccgttggaggtaggccgtaccgttgaaattagcaccttcaatgacatttcctttgggaaagatggaagaggatgtggcaggctggattgtttcaaccttgttttccggtttcggggtacaggcaccgagtgctgcaaccagtaaaaataagcaagttatctttttcatatcgaatcgttattttagatattgtttgaagaaagcgtccagtttcggaatcgtgattttcagatatttcggctggtcgtacaaatccacgtgcgttgcttcgggaacgacgaacaattctttcggttcggcagctttctcgtatgcgtcttccgagaaatatttcgacaccgcattttctcccacgatgaaaagcacaggacgtggagatatggtctcaatttgcgcgaacgggaagaagttcatcatcggcgcaaggctcgtgtaagagtaataacccgtagagttggggtgctgcccgcgctgcggattgtcgtaataatcgaggaaatcgatggcaaacttcggcgtgttctcatctaccttttcgggcagggcgcgaatatcccgacgtgtggctccgccgtattccgccgtgcgctgacgaccgagctcatcgagaatcgccatacgctgctcgtaagtctgcgtgtcgcccacaccctgacggcgggcacgccccatatcgtacatactgatggtggcaagagccttgatacgatggtctatctgcgtagcattgacagaataacatcctccgccacagatgccgattacacctatcttgtcagtatcgacagccgggtggttcgagaggaaatcgaccgccgcgctgaaatcttccaccctcacttcgggcgattccatacgacgcggataaccgccgctctcgccgtagtaggaagcatcgaatgccaatgtcacgtaacccatttccgccagcttgcgggcatgaagcccggaagtctgctccttgacaccgccgaaaggatgaccgacaatgatggcagcatatttctttgccgaatcatagtttgcagggaaataaagatcaccgaccacatcgatcagaaaacgattatggaacgttactttctgtttctttacgccattctcgactgtctcgaccggtgtttccgggttggcgatcaatcctttgctttgcaacaattcgttcaaaaccagtctgccgccatcggcttcgctgcgtccgacgttcttttcaacaatagctagcacaccgcgtaattcatccggtgttacacctacattcagcgcgatacccatgtgtcctttcagcatcggttccacgcctttgcccaacgaggctatcacggcaacggtcgtcagctcccgttcggcataggtcaatacatcccgctcgaaaaggtcggcgaagagatgttctttgaggaatacctcgatttccggagccagtacagcatagtcggctttcggtgcatctaccggaacgcctgaaatttctgcgagaatgtcgcgtccgcgctcatacttacggcgggtatcggttatcggcgacgcttcacgtccccaatcgtcttcgaaaccttttgccttacgctcgtcgagtaccgcaactaacgtttgcagtccgcgcagggcacggggaaaaccgcaataggcgtaggtgtgtaccatcacttctttcagctcactgacggtcatgccgtcattcaacccgtccgtgaggacggttttcagtttgtcgaggtctcccatactcgtaagggttgcgacctctgcaatgtgttgtcgtttactgtccatagcttgttctgctttcggtgtttgagaggctgcgattccgcatccgaataagacaccgagtagcgttgtcataattttcatttttattttcataatctctaccattttatttatctgttttacctgatgcaaaattaggatggaattttcaccccgaccggtcatgaattacggtttgaaggataattattacggttttgtagttcactgactgcaaaagcgtacacagtaattgagtagcaattcgatatgtgaggcgatgatcgttgcgctatgccggtcgatggcatggtgcaactcttctccgatttcccgcaggttatcggttatgattctcctttcgtgctccgacaatgcacccttacagcagcagcgtttcgggtaggtctcgatacggttttcaagcgatgtgtcgcataacaaatcgggatgaaacaacacccccgaatagcatccggtatgtcgatgccggttcgagggtatttcaaccgtttcaccgggataaaccagccgcagccactctttttcagatgctttttcttgctctgaatcgttgtaatacaacagtccgtaaaaattgcacatcatccgaatgtcctcggtcagatttgcctttgacaaatcgaccatacagatcaacggatgcagtgtttcatgccccgtcaatttattgaacctatcaatggtcataagtcccgaattattcatttgtatcattgttctttcttttattcagttttccatgatgcaaaattacaggctgtccgagtgctccatagggtatgaattacggtttcatgtataattattacagattggaaccgataagccgaagatattttctacatttgcatagaaacaatgaaagagactgttatggagaagattatgcaactgaaaacgataaaggagtacaatgattacatgggcgtggaaacgaggcatccattggtcagcgtcatagagggaagccgtatgccgcaccccgtaccccacgcacgcaagcacgtgggaatgtatgtggtcttcctgaaagaattacggtgtacggacgatttgacctatggccgacgctcctacgattttcaagaaaatacgttggtgtttatcgctccggggcaagtgttcggacatgaagccgacggaacaacttttaccggttcgggctggtgtctgctgttccatcccgacttgctgcggggcacgccgctcggccgccatatgcaggattatacttttttctcctatgccgccaatgaagcgttgcacctctccaagcaggagcagcagaccgtcatcgactgtctgacaaaaatcgacgaggagacatatgacaaggcagatcgccacagtaacctgattatcgcttctgccatcgaattgttgctcaactattgcatccgtttctatgaccgacaattcattacccgcaaaaaagagaacaagaatacgctcggttctttcgaagccttgctgaatgactatttcatttcggataaaccctctaaattcggtacaccaaccgttgcttattgtgctgaccagttgcatctgtctgcgaattatttcggagatttgattaaaaaagagaccggtttatctgcacaagaatatatattggcaaaaacaatggatacagcaaaagagctgcttgccgatcctacaaaatctgtcagtgatgtggcttatgctttggggtatcaatatccgcagtatttcagcaaggctttcaagcgtgtcgtgggatgttcgccgaatgaatacagaaaattaaattaacttataaatagctatgtaataattgattaagaaaaaatacttatgattcttcctttagcattcatcttgttaccgacataataatcatttttcttcgctaataggtaaatgtgtatcgcaatacttctttctatattgcaaaggagtcatattatgatattgctgaaacaacttgttcaagtagcacgggtcggtatagcccattctgtttgaaatctctttaatgctcatttgagtgccgacaagcatgtcttccaccgttttcaacctgcttttttggatgtactgtttgaaatcctctccaaaattccgtttaaagaaacgtcctgcataagtgggggaaaggtgaaatttttcagccacaatattcaatttcaggagttcgggctggtggatatgctgcctgatgtattttagcatatactgtgccttgctactgtccgcattatcatgctccggggccaatgtggaaagatttcttacagcaagcacaatgacactgttcacgtagtagttcagcagatagcccgacatcattttcttttcagatacctccctgacaattagttcaatcaaactgtgaagcatttccgcattactctgttgaaatcggatacagtatccggcttgtatgtcgagagccccttcagcatatctgtttatataatcggtcacataattctccgtgaaccggataaacaaataacgactatgtgaacaaatccgaaacaggtgaactctattgggcggtatcaggcataagtcggcggcacaatagttatgatgttcttccccgccatttacggaattgacaacaaaacttccggtaccttccagaatataagccatttcgaaaaaagaatgctggtgctctccaatcggaaatgtatcgtgctcccttaaaagtatttcaactggctgatatagattttctttccacatagcttatttttccatgtttatggtacaaaaatacaataatcttcatttccatgacatttaactttgcacaaaaaaacagaaacatgagaatattaaaatttatagtaacatttattttacttatgggaagtgtatctaatagtttagcacaagtatcttcaggaaggctgaaagataaagttgcaattgtaacgggagctgcatccggcaatggaaaggcaatagctgtcttattcgccaatgagggagcaaaagttattctggcagacatcaacggtatagaagtaaggaagattgcagacacgttgcaacaaaaccaatcggacgttataccggttgaagtggatgtaaccagagaagatgatgtacagcggatgataaactcggctttagagcgatttggatggattgatattctggtaaacaatgccggagtttttgatgaacttcttccggcaggcgaggtcagcgatgagatttgggacagagtgatttctacaaatcttacagcgccgatgcgtggaatccgtgccgttattcctgtatttgaaaaacaaggaggaggagtcattgtgaatacagcttccattgccggctttacgggagcaagggggggaggggcagcctacgtagcctccaagcatggcctgataggactgacaaaaaatgtggcatttaattataaggacaagaatatccgttgtaatgcggtggcaccgggcagagtcgagacaaacctgcgggtaaacagtgagaacttaatcggatcaaaaacggctcatgacaaatccattgataattggagagacatcgagaccaaagtttcggaaggttatatcactaatatgcggaaatgcactcctgatgagatagccaaagttgtactttttctggcatctgacgaggcctcttttgtcaacggttccatatttgtagcagacggaggttggacttcttattaaagacataacaatagcatatggaaaagatttgttggaaaggacatgccgccatgttcggggcaaatgccatgtgggggctgatgtctcccatatccaaatttatcatgttgggaggagctgttacgcctcttgtcgtaactgatttacgtatcgggggtgcgatggttctcttctggatagcttctttttttcaaaaaccggagcatgtcagccataaggacttggcaagcctgtttgttgccgcccttttaggtattgtattcaatcaaggttgtttcatattcggtgtcagtctaagctcacccggtgatgcctccattattactaccagtatgcctctatgggctatggtactggctgcattgatactgaaagagcccattacgggcaagaaggtgctgggcattgcggccggagcgagcggtgcattgctgctgatactcggaaacgggcagcatgagcaaggagcatcggcagcaaccgcgggtggcacaatgatatggggcgatttgctggtgttgctggcacagttctgctatgccctttacatcgtattgtataaggatttcgtgaacaaatattcgctggtgaccattatgaagtggatgttcacctattcgttcatatgtgtccttccgttttcagccggcagcctgatgcgtacagattggagcagcctgcatcttcccgaactgggtggcttgtcctttattgtcgtgggagctaccttcatcagctacatgctgattgtggtcggacagaagaatctccgtcccaccgtggcgggtatgtacaactatatccaaccacttgttgcctgcattgttgccgtttgttggggtatggactcttccaatttcatcaagggcatggctgttatcttcattttcggtggtgtctatctggttacttcgagccggagcaggaaggaactggagtcctataaagctatacgtacaaaggaaaaagtcggatgaatatgatgagaaaatacatcttaggattagtaaaaacaatggatgcagcaaaagaattgcttgctgagcctacaaaatctgtcagtaatgttccttacgctttgaggtatcaatatccagtacttcagcaaggctttcaagcgtatcgcgggatgttctccgaatgaatacagaatatttaattaggatattatttgatttttgaaaaagcctaaaaaatagagaaatggaataccgatatttgttttctttattagttaaatagattgttatgtaatagattattatatgataaacataccgtagtcggtatttattgagacaatattaaaaatcatgtaattttatcccgtttttttctgaaaagagaaaaacgggtattttattatggctcaataggtcaataattacgctttatctgctattaataccctatatccatctgaatgaaaacaaataccgagtgtacaattatttgggggagaaatactatttaattctaattcaatataacttgctatttatcagtatgtaatataaattaaaatataatcgtaccgacctcgtttttagctatctatataatcccgaactttgcaaaagataaaaatgaggatatatggaagtttgtacttactcttgacgtttttatgataatttagtcggaggcgatgatttataaaacctaaaatgtgatatgatgaaaatattaacaaatgcactccttttcaacctatttgcctcctacttggagggcatggtacaagtagcggaagaattgcctgctgcttatgataattttgtaactctgcttggaggacttccacaaagcgagaacctaatattgaagttacgtcgcttgaattataccaaaatagagctggtttctatgcaaatagcatcggagcaaatgttggagaaaaggcatattttgtacgatgtgtttatcggtaaggcattatctcttctcgatacagagatagaaatggttaaagagttatttaaattggggaatattatccccgaattgaaatcggaaataatgaaagatacaaaagataaatctgttatcatgttgacctggaacggtacagacagtgatttgattgaactggtggctgcgttgatggcagccggtgcaataagctcgaaaaatggtggcaaactgactgtgataagtgtaattcgggcttttgaggatatgtttcatctgaaaataaatgcattatataccaaacggggaaaagtgtttgatcgttgtacagacactactccttttattgattccttgcgtgtaagctataaccggatgctggagaaacggttaatttaaaagtcatacgccaacggatgtcaaaatccgactttgattccgcacatttgtttttaccggagagtatgacttattttgccggagaaaacatcaaaatgtataaactaaaaacatcatgtatggaactgactattattgaaacaagcgcgtatctggaaatgaggaaacagttcagtctgctggcggtacagttggaagacttccgtaaaaaggttgcctcacccgcaccggataaatgattggacgcacaagaggtatgtctggctctgaaaatatcgaagagatgcctgcaaaattacagggacaacggccttatcccttattcaaacataggcgggaaattcttctatcgggaaacggatattcaggagatattgagtgaaggacttgtaaaaaggaaataggctatggcagacattatcacaaaggattcggaagagttcaaggaactgaccggatggataaggagagcgggtaaggcggctgaggaagccacggcaagaatacgccccacgattgcggatgagcattacctgactggagatgatgtgtgcgagaggctgcacatctcacggcggacgctacaaaccttgcgtgacgagaacatggtgtcctatactaccatcggcggaaagattctttatcccgaaagcggactgtatgaggtgttaaaaaagaactatcgggatttccgaaggttcaggaaataaagaaaagacaaaaggaatgtccctccggcctaccggctgaaggggcattccttttggtcggtcttagacggccagtttgtaaacatggcctatcttctcgcatagtttgtcggtatcttcgcccactttcggattgataagctcagcatatacctgcgtggaaaggatggagttatgccctaataccttttgcagggtttccaacggcatccctttgagaatggccagaactgcaaatgtatgacgtccgatatgcggggtgatttcggtatggcaatcgcacttcttgccgatgattctgaggctgaggaacatcgtgttgtattcgcctacggggaaaacacaatcgggggaatccttcttttcgtccacacccctgtatttctcaataagctcaacggctatgggcaataacttcacgacataggccactccggtttttatacggttgcccatcagccatgtgcctccgtcggaatcggtatggatgttgtcataagtaatggctttaaggtcggcatatgcaagaccggtgaagcacatgaagagaaacatgtcccgcatggcacgctggcgtttgtatttcagatccacatggatgattctctgtaattcctcttcagtaagaaaagaccttttcttgtattccggtttgcactcgaaggatgtgaaaggatgaactctcaaccaccccttttcctgcgcgatgtacatcagccatttcagggtgttaatacggttgaaagcggtggcattcgcattgcctgccgtgccgagcatccatgtgtaataatcctcaatgaacgatttctcaagctcgtcaatagctatatcctcgatgttctttttggttttcatgaaaagcaaaagacttttgtagtcggcaaccagtccacggtaagtgctttccgcctttcctttacctatcttttctttatacgattcaagctgttctctgaagagcaccataagagtatggcattcctctgagaaacctgcatagcggttatatactttcttggccgtaacaaaactgtcatggtcgcagatgtactgatagtgcttcgttatctgcgccttgatgttgtcaagttcttgattcagtgtgcgtgcctcttcggacttgcctttcgcacggttggcttttacgtcccataaggaaagggacactgttcttttgctgctgaaacccgcttgggttccattgactgtgatgcgtcccattatcggggccttaccattttttactgactggttcttggtgtagaacaatactttgaatgtgcttcgcataactcaactttttttagttacaaatttactttctgttgagttatctgatactatgcaaaaacaagcaataggctgaaatataatatattacacttctttttatagcatatttggcggagttacgatttggtaacctaactcctttccaaatctgcttttttttgctttccttttgcctcactgctaaaaatatgttttataaccatttgatttttagcgtagttgcattatccttacacatcgtttaaaaatacttggtttcaatgccgtgaaactttagatttatcaacaaaaatttcactaatatcattagtaatttctattttaacattcttcgctggttttattatatcagaatttataagacggcataataaaagtcataacctaaaacagtataaacaatttataaatgaatgggttgaaaaaagtaatgcaactctaatagattatataaattcattagaaacattttctaataaaataaaaacaaatacagatttaaacattgcaccttggagaagtggtattattcatctttcagaaattaataaaatcccattagaaaagttctcagatatatacattttcggattaagcaagaaaatagaaaatgagaatagaaaacaaataatgaactttttgtaccaaatagaatatttaaataaagcaccaactctaataatggaagtgtataacaagtattgtgaaaacaaccaaagagtaatggacgaatggaatacatactatatgcaacttttagatttatttggaagtaccaaaactatcaatccacaaacaatcgaaggttctgttttccttgaaatttacaaattatttattccattaatcaatacatcaaatggagaatatgccggaactgacaaatggaaaaatgagtttgttatccctgcaataaatattctgacaagaaaggaatgttctgacttttctatattggctcaaataatgattcttgtcagaaatctaaatatagtaattataaagcatgataaactaaacgactacagtagggtatttgatagttatgtggagaacttgaaaaaagctcaactgattattaacaattcgatgtcttatttcgatggaaaggaaattagacatttctgtatatagcagaaataagccggagcactaagccccggctcattaattgattagccctttgaattttaaccgatttacgatttcggtataaagatactctatatccccgctgaaatccccataattctgatacagaaacacgacatctgcatggttgtcggaaatagtactaagtgctactcttggaccggaacttttataaaatgacgtactatcatttgattatctttagcttgttataccagcgtgaagaaaaagggaaccacccgattaagaatgattccccgaaaatggttactttgtatagtttgctcatggctatttctttttcaaattagacatcacacatttaatcacttcataaatgaaaatagcaagaaaaatagtagtccatggatattggtttatcagttcataaaaatctctcatagttttacctccttccactcactttctataatcacatgttcacacttattacacctatgcaaataagttgggaatggtgccgttgtatagtcctcaacagctatttctatactgccacattccgaacattctatctttacctctttgatactgggataatcccaaaaggataatttgcctttcacgtcctcaattggattttcgtagagaatagggttagctagtacccagttataaactcctttctctgcccagatggaaggatggttttgtacacagtctattatctcgacgcttccgattatggagcctgtacaaaaactaaaatctttccactctttgttttccggtaatgccaataactgctcattggtaagtattgaatcatagaaattatcataattcaaaggtttaccgcttgaatgaatcagtaccctctgccctaagtatttcttagggcagctccaagtacggttctcaatgtctttaataccatggactatcaaagaggcccacggctgttttatggttattgctttcattttttattgttgttctttaatatctcatcaaaagacggaataggaaaccatgcttttatcactccttcatcgtaaaatagatgaggataatccctagttgatgcaaacttattccatctttcaaagaaataaactttctcaataacatcaccgtcagtaacaaagtaatacccatccttttctggcaaccgttccttaacacttatccaaggcgattgcttggattgccattcagcaccttttataaaatatttcttcgccactgctggcaatcctccccaatcaggcatcttatcgtaagccatacttttggctgcttcttctaatgtttgtttcataatttaatgtattttcccatggttgattttacaataatcttattatcggatgatggcattacaaccacattcccggcatctgtgctaatttttaagataggattagaatttgcgtcaatactggctactataatcatatctccaaaaacatatcttttatcttgttctaattcattcatttctgttcagttttgttccttattgatcaattacttttttcaatttattaaaagccttctctttatcaaatctaatcccatctttgaactccaatatcaactcccaaagctggcttttgtaaacatcacctgctttatagtcagtcttataatggtatttctgtgtagtggttatttccttaaatatattcgttgcattaagatatgcggctccccattctgtaagctctacactaacggtatcattcaaatctatttctatcataaatattcctttctcattagtgttacgttaatcctcaatggaatacaatgcctgcatacactcaaaggggaaagatgaatttaaagcgtcatatatttctttcggtatatcatcttcgctttcaaaattaccttcaacactttcagatccaaatgctgttgcaacatgcttctctttatactccttaccattaatggttgcggttgtttcccatccgttagaggttacttcgattactatcttattcattactttcctgttttgaatttcttgtttatttctttttcagcagctctggcccctttcttgaaaccttccacaaagctgtcaaaacaagctctatggatttctaaagtacatcttcgcataagtggacaaatcgaacatttttggctaagtccggctgacttcttggctattttcgttacatttttcattggaaacttaaattaattattacgatttctttccgctgcgacttcactcatacacatcttgcaccaggaggtgagacatcggtattccttatccccacatctgacagtcctgttatagaaccggtggagcggaagggaacgtccgcaatgcggacaaacctttcttccggcttccgtacctgcaaccgtcttggctttacggtgtacaagcgtacatcccctgcattcatccagtctgcctttgtatttccggcatttgtgcagggagatgcgcccgcatggagcgaatttctcgcagtcgaatctgggttctgtatgatagatgttcatacggcactgtccatcaaatcaaacaatgtgggtgcgctaacttccatctccgcctcatacagatatgaaagactgtctttccaatagtcataattcagttcagtagataatcccttacgtttcagtctgatggcacaataaggtactgtgccgatacctccgaaggggtcaaacaccagctcacccttgtttgagtaccgttcaatcagtctttcaacgatatcgagctgaaggggacagatgtggttctgccgtttcttctgtgactgcttggtattaagcgtgcgcatacgggtgacatcatcccatatccagggcttcttgcttaccgggtcaacggccatgaaggtttttggcagcttaccgtaggattccaactcttcggcaaatgcaacgtgttcctcgtagttatagatatgctcgcgttcataattacggaacagatggcgtatcttgtcaataccagcacctttcatgtcctcatagcttaacagggagttgccagatgatttccaacttgcatgggcgtctatctgccagcgggccaacgagtattcactcttgttctttgtcaccggcaagtcagcgtatgcacgtgaggtatcagaaggtagttttcggaagagaagaacatattccgggcaaccgatacccatctttgaaccgtccttacacatttcagtatagccaagtcggtaagtctggttattctcccttactacatccgtatccaccgtgatacgtcccatgtaacggaagccgtgtttcatgtagtggaatactgtcatttcgctgaaggggtcaatggtgggcatgccgtcgcccgtggcattaccaaacagtacacggtctttcacatggatgcaagccaaccgccccggcttcaatatgcgcataagttcaggcgtaaggtaatccatctgctcaaagaacttgccgttgtcctcattatgtccgaaatcattataggtcggagtgtactcatagtggttggaaaacgggatgctggttacaatcagatctaccgaattatcttccatcttctgacattcaagaacattgtcgttattgatcgctttccaaagtttaccgaatttttcctcacgactggcgaacatccaccgcatcatcttctctttcgctttcagcccatacagtccgttttcacgtactatgccggtcatcttggctaccatctccttatgttgtgcccatttctgcatgaagctcttgtatatctctccctcgctttccgcatagaccaagtagaggtcaactggatgtttctgcatgaatcggtagatacgggctatcgcctggaacttatcgttgaaacggtagtcgataaacatgattgccttgtgacagtggtactggaagttcaaaccctcaccaagcatttcgggtttagctgcaaggtatttcaaacggccatctttgaaatcagatataaccttgtcggcttcttcatcattctgtgagccgtacacagccttgcatccgggaataacccgacaaagttcttcacgttccttttctaagtcatgccatagtagaaaatgctcatctttattttcggggcggttaatgatttccaccacacgggccattttttcagacatattatcccggcgttctttcgctgcatcagcaagtccgagagcagcttcacggaacatcttcacttgtccgtcacggtcggtaccggcagtggagttatccacgcttacgacttcttcatgtacacgaagttccggcagttcatatccagtatcgggataaccgaggtcggacggtttggtgaggaacaacgcccatgtagatacccatagccagaactccttttccttgtgcggataaagggtaaagttattcgctttcgtgctgtctcgctggaagaaccttgtaagtgcctgcccggtatccatcactccaaggtagccggcatagtgtatcagctccttgtatctgttgggtgatggcgtggcagtggcaacaaacctgtacggaacttctgcaaacagaggaagaaactcctgataggtcttggtcccgaatccacgtaatacgctcgcttcatccaatgaggtaacggtaaagtaggaaggttctattcttattccgtcttcaccgtcacggacacgttcatagtttgtcaccatgatattggtcggacattgctttacctcctgcatagtacgtacatagttcactttcatgcccagatgcttttcggcctgtgtcaggaactccactactacacgcttggggcaaactatcaaccctttgcctcctgtgcggttcaggatcacccgcagtatctccaactgagttacggtcttctgcataccgaagctggagaatatcgccctgcaaccgccggaaacagcccaacgtactgtatctttcacatggggatataagtacggggtaagttcatcagccttaacttcaaatcctgtctgatggctgattgccatcttgtctttcaaaaattctatataatctttcattatgctattctttttttgattaaactcatgttcttttccacaagccttataatgcggtcatgatactctgatgttccgttgcatacggctcttgactgtactatctgaaaagatttaagattcacttcgatggtttccacatgtttttctccggctatggctgtcatgatcaggcattcactgcgtctgtaatacctgttggcgtatacacaatggtgcatggctttgccctccttgtagaactgggttacgctttcaagcggacggatggttatgccgtcgcctttgatttccatgccgaagaatctttccatccggttgtagaatgatgctatatcctccttgagctgcttttctttttggatagcctttattctgtccctttcccttctttgccttgcctcaatttcatttttctttcttagtaatctgtcgtgctcggcttttaaatttttgggacatacgtatttggcgttatgcagatccttgtggaaataggacagcaggcttatatagtcattccacatgcttgcatctctgattatataacggttgcggttgcagatgttgaaggacggtttatatcggagttggtaatagcccgttttgtacatgtgctttaacatatccgtctgtccggtcttgatacataattccgcatcattgccacctttcagaaggtctcgtacaagttttgaggggggtacatcggggaaccgtttcccgattccccgctttctcaattccgagatcagtttctttcttggatatatccatccccatatcgcatataggtctccacgataattccagctgtaactgccgtattcaccctttatgctcagtggttccgaatatatccatccgctgcttcccatattcatcggttttgccatgatggtgcgtttcccctcgacggtgatccattcctgaaccacttcaaagaaagtatagtgaatataatcctgtctgctgttcaaatcaaaattcctttttctgacgtacttgcagcatagtatatgtcttatgatttggaactctccggcggtctgtaagatggacatatacttttcttcctcgacttttcgtttccggctgacctttgcgtccagtttgtggtggcagtatgggcattcggtcgtatcaccgagcagggtggttcccagctcgctattgcttgtgtctatccatgttccgccgcactcggaacaccatagctcatccttgcacctatatgcttcgtgggtgaatatatgttctttcgcccattctttttgtacttcggtaacggcggacagtttgccgcttagttcggttacacgtttctcaagtttcgttctcggtttcatgattagaacaggctcatttgttggacattatcatccgctttctttcggacgtttttcttcctgagtgtctggtattgttcttccgccagccgtgcgattgctttgtcacgtgccgctttcttatcttcttcggtgagttccacaggtttggcggaggatgatacggacgttttctctccggcaggcagccggtttattttgatatcgtcctcatcatagtagtgcactgccatcccgtagacctcctcgtctgaaatcgctacggcgttaccacgcttcctggcttcacccatgatataactacagcattcatcaatgcttttcttctcattcgcatatttgggggcgaacagtgaatcttcttccgcccgtttgtccagataggctttgattgcctgtttgaaactttcattacttgccatggttacttaattttgaagtggttgataatatttatttgtgattgattctgatgttatactcgcataagaattttcctatatcgtcgcttgctatattgggaggtggtgcattatctccgtatatagcccgtattgcatcctcatttcccccgtatgccttccaataggtgtaggcagtatggttgtttggaacgttaggaaaaagttctgtgaaggcgctgaaatcgtttttagccttttttttgagttcctgaatgttttttactccctcaatcatggcgcacgctgcatcttctatccgggtgaaacctttttgggattgtttcatggcggtttcattggacagtttgacgtgctcgtctcttctatccctgcaaaagtccgatagggctaccataatggactggttgtttatcctgtttccccagacgaactgtccacggcttccgtttttaagctgtgtgaagaatatgcaaagctcggccagattgagaaaataatagctggccaatatgcttagcgccgtttcggcaagttgttgaggtgcgatatcaatgcctgcgtatcggaggattgattgcaggtgctctgtgataatcctgactgatgtggcgttgccgaagacaacattgatgtccgcaagggtgggaataccctcaatcctgattgcttgtgctaatgtcaggttacaattcagctgggcttgcgtgccggaccagtcgtcaaccaattgggaggctgttgatccatttctcaaggtctgctggagcggtgtcagtgtctccggctttttcctggattgaggtatctgtcctggagacattatcacagtgatctgtttttgtaggcttgtttccattttgaagtcttttttcgattatccaaaggttagcccggctgtcccatcgttcaattttagccccgttggtgtttttccagcttagcgcatcgaagtggtagaagaatatctctgcctgctgctcccagtccgggagcttgtcacggaagtaatctttcacctgttccagggtaggggctataaattcggtttttggttttgaaggcttctttttaggtttttcctgctcgggcttaaataactcgctagagttattattatctttactcttaagtcttatattaatgttagcctttttacttaaaggtttacttaagtcattacttaagagtttacttaagggtttacttaaatcatttaagtaataaacgggcgatttcgcatttttcttacctgactcaaactgtagtaaacctttttgctgtaatctgttcctgacttcaattacggttggttctgatataccggttgcgaggacgattcgtctgttgggacactcaaacggattctcccaaccccgactattgcactcgttcaaaaggaagaagtacaaataaacttcgttcgaggaaaatgctacactctgatgtgtcttccaaaattggtttacgtaatctatataagtcattgtaggtaagaatttacttcgtttatgaactcctgtagtgaatggcagataacatacttgttttggtatctttctgcttctgtctgccacgttcgttggtgctcgctctgtgtacccttcggtgtcttcatctctatacagagggaagcccatccctttttgggtatgagcaaaatcaagtctgctacacctctcactgctccttcatacttcatccgtgctcctgtcttggcatcacgtttgccaccgttgggcactgcaaaaagcatacgagccagtttgggatattgtaaccggaaccataccaaacaatcatgttgtatttggctttctgataatggtgttgtctgtttcctcatattcttccgttgaataggttcattgccatatctaccacattctccttaaccacatcatccgtccctgtcactccgttggctattccttttttggtctgaatgacatcatacatatatttgtcgatagtatcctttccaagatagtagtaacagtttacgttgttcttctgtccgttccgatgtgctcggtcttctgcctgctcacaatcggagaaagtccatgggaactcgataaacgccacacggctggaagctgtcaatgtaagacctgtacctcctgatttgtagttaaggatgatcagcttgcaagaagggtcgttttggaagcggtctaccgctgtctgtttttgagtagcattgtcttcgcctgtaacggtgacagcttcagggaatatcttctttaattcctgtactacttctttcaggtaagcaaagactatcagtttctcacctccgtcaatcacgtcatggatgaattcggaaaagactttgatttttcccctggctgatatggctttcaatattcccattttcaccattacctcgcctcttaatgccttggccaccttttcatcgtccgcattcttgtaagttcggagatactgtatcaggtcggcttccgctttgtcgtattctttgcgattggatatgtccacctctatatattggcgtgacttgtccggcaactgagtgagtaccttggccttttcgcgccggaagaagcaggtcgatgataacctccagttcagttctttcacattgcttgactgtttaggtccatcgcagaacctctctacgaaatacttgtatcctccgaaatcctctaatcgtcccattatcttgagttgttgtataaggtctgtattgttgttcactactggggttcccgtcagttccaagatatattctttgcctttacatattccttctatgaacttggattgctgggtcttggtggatttgcacttgtgtgattcgtcaatgactacggatttgaataacgatattcgcgggtcaaactcaatggatttcatggtaaaccgtgcatcctcctttactttaagtacaaaaaactttttcaatgattcataatttgttatgaatatgttgcagcatttagtctcaaagaaacggtgccagctggctttattgcgatcatccagaatcatggcattttttccggcaaatttcttaaattcacgttgccagtttattttcaatgcggccggacaaatgacaaggcacggatacgcttttgctatcgtaaccgtgcctattgcctgtaatgtctttcccagtcccggttggtccccgaatatgcaccgcttgtgctgtagcgcataagcgatgccttctttctgatattcgtacggttccaacagcaattcgtgtggaaccgtaagttttggaaggtcgggaatagtatagtcattatactctcttgttgtcactttgtgctgtacccggctgcatatccttgtctgtaccgcccaatctgccatcatcctcacgtattccttatcttgtagagataccttccaagctttttcgtcagcgatataggctgcccggatattctgttttacacttggaatccgtttgactagctccactaatcttggatggtatgggaaggctagtttgaagcagttgggggtagtagttacgcaaaatggggacggcggtatcatgatgcaagttgtttgactttacgtggtttacgtgatttaattttctttccgttcattattatgtcaacccctgcatcattcatagcctgctggaattccgcaacctcttgattgaagtctgtaccggcttctggaatggcgtccggttgtacgtctgcgttcgccgtgtcttcctcaaacggaagttcctgttgtacaattcgccattttttgttgaacagatactctttgacttcgaactcacaggattggatttcctgttccagctcgaaggcattgatatacgattcattctcattattgaacatggtgaacggagcgcataggttcagaacttttcctgttttgagaaaacgtttggctaccagagtaaccccttcattatctccatctccgccaatggaatatcctgtaacgtcaagcacctgtcctatgatatcaggcacttcatctactgattctataccgtccacttctttctgttctgtaagcaaagcggcgtggggattcagcttgctgaacgcattgataaggtctgatgttaccaggttcttgccttctacggtggttgtaccattctcatccttgtaggtggccaccaaggtactgtccttggtgattttagcttttatgatcttcattatcttctatatttatattcgttgacaaattcgttataataacggtcttccggaaggggaagtgttattcccagttccgtggctgcatctgctttgaccttattcaaaaagtccgtcatttgcagtgtgttcagtttcgatgtgcttccggctatgaccgtttcttttcctttgataatggttgtccttcgtagatataggttgcagtaataatcgtgtacgtcctgtttgtccgttcctgtttcctgttcgatacaggtaaaccaaagccacatcagggcgttttgacttaatgtgcgcggctctgtgtaacgttcgataattaacctgtaacgaccgttacggagctgcgagcacatgaaatcaaaggacttgttcagtgttaccacacctttttcttttataaggatagcttcttgtgccattattccagtccgaaaatcttcttgtccgtgatagattctctattagcttccaaaaactctatgaaatgttctacgtgtgccgtgagcagtttcactgtctgttcgtgattgtaagtataatattccggatattgcgtaccactgataagcggtgtgcggctggtaccgcctttcagcgcataagccgtaaactcaaatgcctttatgttttccatctgaccggaagcaattaggcaataagggtagacatggcgctgccacccgtgggcgtatttgccgaactcgtatttagatgtggattttatgtcataaacaacatcctttcggagttcgtcgataaatccgtataactccacatttccgtactgggtaggaagaatggcggatacatagacctgacttaatgagcctttgaaatactctgcctgttctatacaccattgtctgtcgaaaaggaaatgccgtgcaggtgcgatatccgttgcggggaaagctacttgtatagtattggtttccttatcgccaatgatggagtagggggaacgctctgtcggcacgtgattttcgcaatggacatagcagtcaatgatagcattgaaggctgttcccttgtcggctgcttcactctcaaacggtacacggttgatagcatccagaaggtcttgtttcaggctctcttcgatttctttcggagagcgtttatactctccggtttcattatcaatgttccagaagttttccacttcttcatcagctctcagatacttgtcgaatttgtcaagtaatgagggatagattctataactaggctgcttcatatattttttttactttgtcgaatttcaaccctaattccttgcatcttttattcagtagcatacctgcttgtaatttgctgtcgaagatatgctgcaggctctccagtgattgtttcacttcgttggccgtgtccgcatccgctaccatggctatctgttccttgataacttccataagaccttcatattcggaggacagttctgcctgtttttcctgataggtctgataagtgtttacaatctttgtcataaagtcgttcggcccggtgattgtaccttctgcattaatgataactggtagctttatgcgtgccggaagattgcaggtattcttaccgtagaatttctcgcacggatcaaaagagatggttctgtccttacctatggcttccatatagcctacaagatcaagctctttaatcaggtcaccggcagaagaacctccgatttccgggcgtatctgtttgtcctctccgttcttttcctcgcgttcatgggctacgaatattactgatttacccattagtgtgacttggtttacgaagttgatgaacatattctttcgtactccatatccttgcagggacagtgtgccatccgctttcttcattttgggattgtttttcattatatatttatccatgaaggataacatttttcctgccgtatcaataacgatggtcttgtattcggcaatttctccgctcgtaagaacttcatccacctcttcccatttggaaatttgtacggtgtctacacggtgggctgcattcacacggtgaacgccaccgtcaaagtccaggagtagtggctggggagagcttaacgccagtgtggtctttcccataccaggttgtccgtagattaatgccgacagggcattcttaactgtcagttcgttaggttttttgataagtcccataatcaataatttttagtggttaataaatgagttaaaaaaaatagttcccggatagtcggccaggacacaccgggataaataaggatatagaatataacatataaagagggctctcacctcacgctgtcctttccagcggctttgggttaaattattatctaacaaattgctctctgcttcactgccttgaagtctctaacatggctacgtttaaagggtgtacggctccctctctttgggtgtgggtaatacaggattcgaacctgtatctgtattcctcctgaaaacaatcacaaaccgtctgaacgtaaagaaaaaagtgaataccgcttttccattaagctaattacccgtgtggcttatgccactttcttttttaattttctaggcttccttggcattttgacctgtgcataacgcaggacatcactggcattgcagaaccatttcccgttttgtgcgcatgtaggcttgtcggaacgtattttgttttcttcgatcagtctgataagccttcctatgcctccaactattttggccgcttctcttttaccgaatgtatgagtgtccatgatggctaggatgtctgctagccgtgcttctgccgttccatcaaataagatggatgtccgtagttggttgttaactgtatagttcataatctgaatctgtttttgttcgtcttgttcttgatacttgggtggttcttgtctttgctctgctgcattgtctcatgtcgggatgaaaatccaatgcggcaatgacaaggaacaggatggagaagaatagctcaagcccgtgtttacgtatctcttttatatcgaagttgatcttcatgcgctcacagaacatgtataatacaagctcggtatctttggaaatacccagctttttgtatatatcccgcttctgtgctttgatggtccattccgagcgttgcagactgtcggctacttccttgtcggccaaacccttgcaatattgttcggcgacaagatgctcgcgctctgatagcgtaatcatgacacacgctggattttgaactctccgcgcttgcggtcaacctctcctgttcgtttccaatcggcattttctacacacatctccaatcttagtctggaaatggttgtgttgacggaagatatcgcacgcacagggaacacaacgatatcacctaccttcatcgctctcaatgtggccgcccaattttctgttacttttaccatattacttcaatttagcgagtttaacaatgttgtctagagcattaatgctgctttcgtgtcgtgcctgtaggcgggtgaacgaatcgaaccacatgtcgctctgttccttgacttctttaaggtcttgttccagttcttgtacacgtcttacaaggtcttcgtgtgtcatgctttgtaattcttctactgttgtcatagctttattttttttgattttcaatattgtcaagttcgttgcttatcactagtaatgtggcggtgaatgatgctgccgccacccaaaaccatgcgtccatgttctgcatggtaagaaggagcattagaaaggatgctccacagatggaaatcattgttttcatttataagtatatagatcttgcaaaatcattctttgctattttatcataccaataatcctcttcattttcatcataggattggggctctattgtcacgttccttttaatcttgtctttgtgacttattacatcatccagtgctctaattgctttcctcaacatttccgcattggatatccttctacgcttcatgagtttcattagatagtacatctctctttcacctttgatctcaactaataatgccctgttgttaggatttgccgtaaaaggatatgctggctgttttatcagtctataaaggctgaacacttttcctatcatggagtcgtccaaagctctttcttttttcgaaacacaagacgctctcagcgtaatccttatcaaatcacatacattcataccgttttggatcgcgtaactatttatcatttggtatatttcttccgggataacagtttgtaacctaacggctctgtcatactttgcttttggatttttcatatatgctatccttttgcacattctgtccaacagtctgtcaggagcattatagaaagctgtaactgcatggtaatatatttcgtttctgaaccgataaccactcttgctcatgttgagggcaacggcgtttttcaagtctacaggtattgccccgatagaataatatacatacttattaggggtattgtattctttaccatatttccagactttcattgcaatactttcacaaggttttccgcatatatgagcgatgtaattagataataggtagcacattatttcaactctgtaggctttgttacggtataaagagaattttaacatgattttttctctttcttcttttgtcatgtaaagagtcagacatgaaatttgattttcctttccgcccttccagcctttcggcattatcgaaaggttgatttctttgtttaatctaattaggtttctcataagtagatattattagtttgtgccccgataacctctctctggtcttcccaccggagttgtcagctactgttcttcactgcataaccgttcggggcatgatcgcccttacttcgcccggctgcttgcatcgaccttgttacaggctgcttgcttcgaccgttagttctcgcgtcctctatgctgggattgagggtaagcgccagtatcgctttctggaacggattgctaagggcaatcactccatgtagttcctgccataccttttacggattgtttccggtatcgagaccggacaggataatcctgattaatgtccttattaatctccgcagtactgggagcctaaatatccacggctgttggagttgtagcagtctgaccattcggctttgaaagtgactttttctgctttgaccggagtgaacactttgttgtttctttcttcctgttgtcttgccagctcttcctgcattgtaacattcagttttgccagtttccatgttgatttcagaacttcaccgaaggtcttgccttgtttcttgcctacatacttgtaagttctgtgggcatctctcataatctgtcgtaaatcgaatcttttcattgtcttacctctttttagttagtcaatatttttgcacttccgaactatttttcgttcctttgtgctgttgtttattgtttgatgttgcaaagatactaacatcactgatatatcaatgatattagcctataaatatcactgatattaactttaattatcattataggcttaatatattagtgatatgtacgatttgaaaggatttagacaggcttttaatcttactcaaaagcaattggcagagattctaaaatgtcagcagtcaaatatctctggaatggaaaagactatgagagacttagaaccgatacaaaaaaaaaggctggaagaagcatacggttctgagtccgtggctaaatttgttgtatcttcttttttggaaagtacgataaatgatagtcgaaacaaaggggatatgggaggctacaccacatatcttcttcccatgtcagctatgggaggaacacttacgggttttgcggctccaggcgcaatgctccaaaattgtgaggctataatttcacccattgaagatgtagactttgccattacagtatatggagatagcatggcacctgaatacccctcaggttcccgtattttgataaagaagataaaccccaatatctttatagactggggtaaaacatacgttttggatactgcaaatggggttatagtaaaggaactccatgaatgcaagggtaaggaaggttatgtgaaatgccattcggtaaacccggatccgaaattctcggactttgacgttcctttgtcagaggtgtacggcgtgtatcgagtacttatgtgtatgtcggcaaaataacaagtgaaagcaatctgtataataaacttttaatataaaatactatggattttaaagatgcaattaaacaactcgcagacagagttggaaaattaaaagataacattcaaacagaagaagcaacaaagaacgcttttatcatgccttttataaatgctttgggatatgatgtctttaacccgttggaagtattgccagaaatgacttgtgatattggtacaaaaaagggagaaaagattgattatgccataatgaaggacgatcagcctatcttgcttattgaatgtaaacactggaagcaggatttgaatcttcacgacaatcaactattgcgttatttcaatgtttcaaaggctaagtttggattattgactaatggtattatttatcgtttttatacagatttgaaagaacccaatataatggatgataaaccattcttggaagtggacataacggatttgagggataatcaaattgaagagttgaagaaatttcataaatcgtactttgacgtagacaatatactaaactcagccagtgaattaaagtatatgggagaattgaaggctatcattcaggaggaattttcctcaccgagcactgattttgtgaaaatgtttgcgactaaagtatatgaaggaagaatgttgcaaaatataatcgatcagtttacccctttggtaaaacgtgctatttcttcacatatcaatgatatcattaatgagcgtttaaaaggtgctttaaccgttagtgattcaaaaattgagtcggctcaaccgaagcaaactgacactccggctgaagaaactcaagcagaaaatcaaccagaatcaaaagtcgttactacagaagaagaacttgatgcttatcgtatcgttaaggcaatctgtcggaaaaaagtggatatatcccgtatagtatatcgtgatgctcaaacatactttagcgttttgcttgatgacaacaatagaaagcctatttgtcgtatgtatttcaatacagctacaaaatatgtggctaccattgatgaaaataagaaagatgtgaaacatgttattgaaagccttgatgatatttataactatgaggatgaattctttaaggcgatcgatatgtacgaacataaggaataggataaaagttctagaagattaattaaagataattgcagcattagcaaatgtattgttagtgctgcaatgtgaatattggagttttattatatatggttcaaagcatatatgactgttcgtgtcagtggaaaaatcaaaaacactgtaggctttccccttcatgcaaagggtggggatgtcggtttttgactacacctatcgaagagatcccagctacaatccaggagaaagcaaagctcttttccagagtgtatcgggaagcgaagcaaaagggagtgctggaatgcccgcactaccgatcaattttcatagatgaggtgctggccaatttgccgaagggtgaagtgtgttaaataaatggtttatgttattgtttattgtttgattttcgtatatttgcaataaatcttaatttgaatgggaagttggagtgaacaacaggaagtaaagaaagaagtcaaggaaaaggacaaggtaagacgggaaaaacttgccgggttgttttttgatttagcaaaactttcatttgccggacttgttgtaggtggaatagtttccatgaagcctgatgtagatataactcttgacatatacagggttattataggtggaatctctaccatcatttttattagaataggaaatacaattttaaaataaagtggattatggacatgttaagtttagtatatacaataagtgctgttgtaggtggtggatttttggtgtggcttaacacaaaatccgggaaaaaatggctcgcaaatctatagtgtacttctcattggaaattgagggtattatggatgcattaggttttagtctggcaacaaaaagtggttggctggtctgtgctctctgatgccttacaattttggttaatgtatgaaaaggaaatcccttgaatgtttatggtcgttcaattatagtagtgagttgaacggctttttagtatttggacgttagaacagggaaaataatgaataaaataaaatagaaaatcaagatgatttttactaaaacgaatcttggaggattttgaatgggtagataaccttctgcttgtcagtatagtaagcgcagatcagagttcatactggcagtctaaaggtggcgagttcgagtctcgcatgctccactttttaatgagaaaatgaaggtctgcggagcaggtcttttttaacttaaagactataaatatgttaatttataatacaacttatcaaacaggtattgacgatgcgcgtaattttgtcatttggcttagtgaaagctacattcccgaagtggaaaaaacgggaatattgcaaaatccccgtcttacgcacatccttagtcataaagagcaggattcagaatgtttttcattgcaatgggaggtggaagatacagcgaccttacaccgctggcatactcagcaggggatgcatctgaatgaggaaatgatgaagatatttaaagataaggtggttggctttcccactttgatggaggtaattaagtgattcagccggtaaaagagaaaatcattctgggtatagatcctggaacaaccataatggggtatggtctgctgaaagtagtaggtactaaaccgcaggtaatgactatgggggtcattgatcttcgtaaatatggtgatcattatttaaaactgcgccgtatttttgaacgggtggttggtataatagaagcctatttacctgatgaattagcaattgaggcacctttttttgggaaaaatgtgcagtcgatgttaaaattagggcgggcacagggggtggctatggctgctgctttgagccgtgatattcctataacagaatatgcgccgttgaagataaagatggcgataaccggtaatgggcaagccagcaaggaacaggtcgctgatatgttgaagaggatgttacatataccagagagtgatatgctgccttttatggatgcaacagatgggttggcggctgcttattgtcattatttgcaaatgggcagaccgacattgactaaagaatattccggctggaaagattttataaataagaatcctgataaaataaaaagataagattatgaatgtgagacatgttatttgggcatcaattgtttctactactattagttgtcagtctgtgaaaaaagaatataattcgtttgatgaatatcctgtccgtgaagatgcgctgactgaaatggagtactcacctgccgaaacaaagttttcactttgggctcctacagcggaagaggtgcgtgtccttttatttgaatcgggtaatgaaggttcagcttctaatacttttccgatggaggtgggagagaatggtacctggactatttcaataaaagaggacctgaagggtaaattctatacctttaatgtgaaggtgaacgggaaatggttaggagacactccgggaattatggcaaaagccgtaggggtaaatggtaaacgggcagctgtgcttgatcttcgttctacagatccggaaggatgggagaacgatgtgcgtcctcctttgaagaattatgctgatattatggtttatgaaatgcatcatcgcgatttctctttggattctgtttctggaattcaaaataaaggcaagttcctggctttgacagagcagggtactatcagttcttcaggcgagaagacaggtattgaccatctgaaagaactgggaattacccacgtacatttattgccgtcgtatgattatgcctcggtggatgaaacaaaactggacaaggcccaatataattgggggtatgatccgcaaaattacaatgtgcctgacggctcttattctacagatccttataaacccgatgttcgtatcagggaattcaaacaaatggtacaagctttacataaggcgggaatcagggtggtgcttgatgtggtgtataatcacactttcaatacagacgaaagcaatttcgaacgtacggttcccggttatttctatcgccagacgaaggacggacaatgggcaaatggttcgggatgtggaaatgaaacggcaagcgaccgcgccatgatgcgtaaatatatgatagagtctattctatattggattaatgaatatcacatagacggctttcgttttgacttgatggggatacatgatattgaaaccatgaatgagatacgtgcggctattgataaaatagatccgtctattttcatgtatggtgaaggatgggctgccagttctcctcaattagaagcagacaaactggcaatgaaagccaatgtggaaaagatgcctcgtatcgccgctttctcagatgaaatgcgtgatggtttgcgaggtagttgggatgatgataccaaaggagcttttctagtaggggagccgggacacgaaatgagtatcaaatttggagttgtgggagcaatcgaacatccgcaggttataagtgattctgtgaattatagtaagaaaccttgggcgttacaacctacccagatgataagttatgtaagttgtcacgatgacatgtgtcttgccgatcgcctgaaagctaccatgccagatgcttcggtagaggaactggcagctttgcagaagttagcggaaacatttgtctttacttcacaaggagtaccgtttatatttgcaggggatgagatgatgcgtgacaagaagggagttcataattcttataatagtcccgacagtattaatacgatagattggaaaaataagaccgtgcataaagatgtgttcgaatatgtgaaaggtttaatagccatgcgtaaagcacatcccgctttccgtatgggggatgctgatatggtacgtaggcaattggagtttttacctgtaaaaaatacgaatgtggttgcctttatcttgaaagacaatgcaaatggtgactcatggaaaaatatcatcgtagctttgaacagccgtgcagagcctgtcaagttggacattccgtcgggtaaatacactgtaatctgtaaggatggcaaaataaacatgaaaggcctgggacaggtttcaggtgctgaacttatggtaccggcacgctctgcaatgattatacatcaatagaaaaaggctcaaagaagattaataaagactttgtcgtacagactaaaacacataatacgaatggaaaagacatggagatggtttgggaggaaagataagataacgcttcccatgcttagacaaatcggggtggaaggaattgtgaccgcccttcatgatgtacctaatggtgaaatatggactttggaagctattaagagtttaaaagattacattgaatctcaccaattgcgctggtcggtggtagaaagcctgccggtaagtgaagctatcaaatatgccggtcctgaacgggggcaattgatagaaaactacaaagtaagtctggccaacttaggtaaagcgggtatcaagaccgtatgctataatttcatgcccgtcattgattggatacgtaccgatttggaacatccttgggaggacgggaccagttctttgtactttgacaagatccggttcgcttattttgattgtatgattcttcagcgtgaaggggcggagaaagactataccgattcggaattacaacaggtgcgtgaattggataagactataaccgaaaccgagaaaaacgaattggtcgataccattatagtcaagacgcagggatttgtaaatggtaatataaaggagggagaccggcatccggtagccatattccgccgtcttttgtctttgtatgatgggatagaccgtgatgccctgcgtgaaaacttacgttatttcttgcaggctgtcatgccggtgtgtgatgaatatggcataaatatgtgcattcatccggacgatccccctttccaggtattgggcttgccgcgtattgtgaccagtgaggaagatatcacctggctcctccatgcggttgataactcgcataacgggctgacattctgcgccggttcgctcagtgccggattgcataacaacgtaccttcgttggcacgtatgtttgcgcaccgtactcattttgtacatttgcgcagtaccaatgcatttcccaacgggaattttatagaagcatctcatttgggagggcgtgctcatgtgatagagttgatccgtatttttgagaaagagcgtccgggtgtcccgatgcgtgtggatcatgggcgcatgatgctggatgatgccggcaaaggatacaacccgggctattcgtttcatggccgtatgatggctttggctcagatagaaggtatgatggcggttatcaacgaggaatcaaaacttaaatcctagattgacgtacatactcactttattggctcggtttgcatagtttagtgatgcctctaagggcccgaacatactatccaaaccgtagccgataccgcagccgaacatggtatcctgttccaacagatacctcagcttgcttgcactcagcgcataatttcccgttagcgtcagataatgtacacttcccatccgttggcggaatttcatgcttcctatcagtagcgtatttctcattaattccacattgtttattcccacaaacggtagttgttgttgcaggaagcgtccttgcacatctccacccattgcattaagtttggaatatggaatatcttttcctatcaggaatcggccgtaaatggcaggcagtatggagaatctgcgtgtaacagggaccactccctggcaataaccttttatggctgaaaaaggggcatggccgtcatatccggtaaagttgtcggtataaagcgaataagaggctcttgccgatatgcctttggttgggaagtacgccttgtcgaaagtctcgtaatgcatttgtgcgaaataactgaagaagtgttctgttcctacgtcaaaaccctgattgccttcctggtataaaaatttgtcatagtcatacaattcataccttaatccgatagcaaaacgcacattcttgtaccatacatccgagaatgacagttcccccaaatggtagcggaaagtggagttatgtgacttatctccataacgatagaaattaatatcattgtattgaaacatatatgccagcccgatattcttcaaaggagccggttcaaatccataatctatgcgcgcggcataacgtttccccagtcgtcctgtcaaagacagcgtagtgggtacttttccccggaaattgctggtgacattaatcagcagactggctgtttcttccgaatcaaaacgaatccctacgtttagtttattctcatatttcttgcttagaaggaaatgtaaattatagcctccgccgggggcttcgggcagattataagtggcgctggaatattccaggttagaacacaatatggccgttgcttcttctatgcggcggatgcttatttcagaatcctcctttaaatcacagcgtttcaacagccatcgcttgtctttctcgtccagcccgtcgaaagtgatttcttttatatacactttgcggctgggggagtacggatagctgggaagaggtttcggcatataggtgctgtccagacccagttcctgcttcagcttcattaaagcaccttcttgtgccagtgccgcttcttctccccggcggatcagtgtatccactgcattaggtgtgaagctggcagctgaatatccttccacattcaccttgatataagcattggtctcttccaggttctttttataaagctgtaatcccatcaagttgatgagctgccccaaaatactgccggcgctattcagttcgttggcaggcttcaagtcactttgtacgtctactcctataataatatccgcccccatggcacgcgcaacatttacagggtagttatttaccacacctccatccactagaaccatactgtccagccggactggagtgaatactcccggtatggccatactagccctcatggccgtagccagtacacccttatgaaaatttacctcgttgccatttacaatattctcggaaacacaggcgaagggaataggcaacttgttgaaatcgatggaatcatgatatcctacggtcagctcgctgaacaggtttgccaagttttgtccctttatcaatcctcctatggcttgtgttttggcatcttttccgaatggaagagagaatacatacttttcagcggcctcccgttccgccatattttgttcactgcgtggtattttgtcactcagcagaaaagtccagtcttgccggcgaaccatgctgtctaattgttcgggagtataaccgatggagtaaagtccgcctatgattgatcccatgctggttcctactacataatctatgggaatgccggctttttctatgacctttaaagcacctatatgtgccattcctttggctcctccgccactgagaactatacccaccttctttcgggagtgtggttgggctgttatgtgaacggagatacaaagtaaccctgctgctattaacaaggtagagaatttcatctttttcatcttactataaatctagtctaagttaaaaaacaaaaacagtgcaaagatggtttaatctttcagcttttacaagtgctgattgtcacagatattggtctattttgctgctgagatttcaaagataagaaattgtaccggaaaaaagaattttgtatatcgcttttttgtcgtacctttgtctgtgtaacgaaaaaagtatggataattttgcagcaatagacttcgagacggcaaataatgaacgtaccagcatatgtagtgtgggtgtggttattgtgagaaatggtgagatagccgatcggttctacagcctcgtccatcctgaaccggattactatttgtattggaacacccgtattcatggattgacacaggaagatactgcccatgctcctgttttttcagaagtatggaaacaggttgcccctaaaatagaggggcttccgctagttgcgcataacaaagcctttgatgagagatgtttgaaagctgtgttccgtacttattgtatggattatcctgattatgacttttattgtacctatcaggcttcccggaagctgaaagggttgagaaaccaccagttacatacagtggccggtttttttggttttgaattggagaatcaccatcatgcgctggctgatgctgaggcgtgtgcatggattgccagacagattctgtgagttataattaaagatttatgatttctgaaacccatgatacaagaagatacttataaaaccattacagacattgccgaaggcatatatacggagaaacggagtaaatttatagctattgccattccggtacgtaccatagaggaaataaagcagcatcttgacgcgtatcagaagaaatattacgatgcccggcatgtgtgttacgcttatatgctggggcatgaaaggaaggatttcagagcaaatgataacggagagccttcgggtaccgcaggaaagcctattttggggcaaataaattccaatgagttgacggatatccttgttatagtagtccgttactttggaggtataaaattgggaaccagcggactgattgtcgcttacaaggccgccgctgccgaagcaatagctgctgctgatatagtggaaagaacagtggatgaagaaatcaccgtatcctttgaatatccttttatgaatgatatcatgcgcattgtgaaagaggacgagcctgccatcttggagcaatcgtatgatatggattgcctgatgaggctccggatacgtaaatccatgatgggaaaactccgtgcacgtctggagaaggtggaaactgcccgtattattgaataactctgtcggtacgtcgatatttcttttggtcatattcactgcgttcacagcagatgagaagcatacggaatgtgactgtaaaatgtattccccatatcaaatgaaacagatttgtaatatgaatgaaatgttacagatataccgaacctatatctttgcagccgtaaacaaagaaagtcacattaataaaaatgagaaatacacttgtagcgtctgcttttacaatgctgagtattgcaactgcttccgcacagctgactattcctaaagaatatttgccggaagtacatggaacgatccgcggtaaatatgaacttcaaaccactaacggaatgcaacggttccaagtacgtaacgcccgtgtcagtctggacgggaaggttcttccggtaatcgcttataaagctgaaatagacttgtccgatgagggaagtatcaagatgctggatgcatacgcccgctttgtccccaatgatacatggaatgtcacactaggacagatgcgtgtgcctttcaccatagacgctcatcgatctccccaccaacaatattttgccaaccgttcgttcatagccaaacaggtggggaatgtgcgtgatgtgggggctaccggagctttctctttaaaggagggactgccgttgaaactggagggcggactgttcaacggctccggactcaccaatcagaaagagtggcacaacacgttgaattattctgttaagcttcaattgatgccgtggaaaaattataacttgactttgagtacccagaaaatacatcccgataaaatcagcatctatatgtatgatatcggtacttactacgagtttgataattggcatatagaagccgaatacctttataaaacttatgcgaaaaactcatttgatgatgtacatgctttcaacgcctttgtcaattacgacttgtttatcaagaaaggtctgtttcagaaaatttcatttttaggacgttatgacagtatgggagatcatagtaacggtaatgcggatgaggatggtaaactttacattaccgattattcccgccagcgtgtgactggaggtgtgacgttaagctttggaaaggcttttcaagcggatttgcgtcttaattatgaaaaatatttttatgataaactttctttggcaaaggagtctgaacaagacaagtttgttatggaattaatggtacggttctgaaaaaagtagggtaagtaggggaccctacttttcccggaactcaccgatatatccgtgctatcttatcgggagacaagcctacccccatctctctttcatcatatcttccagtttcagcaattcatccctatactgtgcagcttctataaattccagcttcttggcagcttcctgcatcagtttccgggtacgttctatcgttttctccatctgtggcttggtcatatactgaacaatcgggtcggcagccattgtattggaagatggctcaatatatgccttggagccttgagtggttcccgccgcttcgttgctgttgttgcccaacaaggcagcattacgcgcacgctgtatttgtttgggggtgattccatgctcttcgttatatgccagctgtttttcgcgacgacggttggtttcgtctatcgtttttttcatgctgtccgtcatgcggtctgcatacatgattacttttccattgatattgcgggcggcgcgtcctgctgtctgggtcagcgaacggtgggagcggaggaacccttctttgtctgcatccagaatggcgaccaaagacacttcgggcaagtccagaccttcacgaagcaaattcacacccaccagtacatcataaacgccctgacgtaattcatccataatcttgacgcgttccaaagtgtccacatcgctgtggatgtagttgcagcggatgtcattgcgcagcagatattcggtcaattcttctgccatgcgtttggtgagcgtggtcaccagtacacgttcttctttctcgatgcgttgctgtatctcttccatcaggtcatcaatctgattcagactggggcgtacttcaattaccgggtccagcagtccggtaggacggataacctgttcaacgataatgccttcactttccaccaattcataatcggcaggtgtagcactgacataaatcacttgcttggccagttccttgaactcttcaaattttagagggcggttgtcaaaagccgactccatccggaaaccatattccaccaaattggtttttctggcccggtcaccaccatacatggcacgtatttgcggtacgctgacatggctttcgtctattacaatcaggaaatcatccggaaaaaagtccagcagacagtaaggacgggtacctgcattacgcccgtcaaagtagcgggaataattttctatgcccgaacagtgccccagttcgcgaatcatctccatatcgtatgtcacgcgctcatagagtcgtttcgcctcatacatttttccttcctcctcgaatttggccacctctttcgtcaagtcgtcctcaatctgatgaatagctctcaactggctctctttggtggtcataaaaagattggccggataaattttgtattcatcaaaagtagccagacggattcccgaaacagggtcgatctcttcaatggcatcaatttcgtcgtcccaaaacataacccggaggagattgtcgctatatgccaggtaaatgtctaccgtgtcaccttttacgcggaaattcccgcgattcagctctatatcgttacgcacatacaggctgtccaccaaacggcgtaaaaatacatttctgtccagcagtttgcctttttttatctcaattacattattatagaaatccgacgggttccccataccgtagatgcaggacacggaagacaccaccaccacgtccttccgtcccgacagcagggcagaggtggcagccagccgcaatttgtcaatctcttcattaatggccagatccttttctatataggtgtcgctggacggca

SEQ ID NO: 14418 - DNA, 49587 bp, Unknown
  gut microbiota DNA sequence
gataatgcagtagataactaactaaatcgtaacctattactatcaagagcaattaacctacgctcatttccaataaattacactcttttcgtaacttcttgcaacaaagatacagttttttaggtagagaagcctctttccataaaaaagttctatctttgcgtgacgattaaatcgttttattgtaggaaatcatcataaaattactttttataaacttaactttattgatcatgaaaaaaagcaaaacatttcttgtttgcgccacgttgagtggcagcgtcttattttcatcatgcatcggttctttcggattatggaatagtttgaaagactggaatcagggagtaagcaacaagtttgtcaacgaacttatctttctcgctttccatattgtccctgtttatgaaattgcttatctggcggatgtattggttttaaattccatcgaattctggagcggctctaaccctacagcttctatcggtgaagtaaaaacagtgcaaggagaaaatggcgaatacttggttaaaaccaacgaaaacggttataccattaccaaaaaaggagaagacaaatctgtagatttggtctacaacaaagaaaacaatacatggaacgctgtttctggcgaacagagcttcgaacttgtgaaaatgaacgaagacgggacagctactttgagcctgcaaaacggaacctccatgactgtcactcctgatgcacaaggtattgctaccgcaagaatagctataggaaactctttgttttttgcagcaagataacaaacacaacatcatttaaacacaaagaaaaggagttgtccatgcaaacaacttcttttctttcataaaacaatactactatgaagaagcaaatcatgctaggcggcctgctcctattattaggctcctgtgccccccaaaacaaggcaaatgccccgaatgcaattgacattgccgcaagtctggaacacctcacagaattaaagatctcccaattgggaaaacagatccgttatatccttttagaaacaacagactcatccctgattggcaactcttattccatcaaactatctaaaggccgtatctttgtctctaccaacggacgatgcctgtcattcgacaaacaaaccggaaaatatcttggcagcatcgggcacaaaggggaagatccaaaaggatacagcaatgccaactgctttattcacccccataccaacaatctctacttttatcgccaacccgacaagttggtaaaatacgacacaaaaggtaattatctagggcaagtaaacctgccacaaaagatttccccatccctttacttcactttttccgactcccttattcttgctcattatggagaaggaataggacaaccgcaagcaagtgcgttactttacttcaacgaacagggagaaataaaagactcattgccggaatttgccaatccaggtaaccctatgggcatggatcagatatccagcatcaacgtattcaagcaattacccggcaacgctaacataggaggattaatatatataaattaccagaatggaacaatgaccgttcttcctatagaccagccttcactttggctgagtaacggcagcatacgtttcagaaaagcgttcaatgacacaatctatgacatcaaaggacacgaagctactgtccataccaccttccataccagacaatggcatttcccagctgagaaaatgggacaaaaagaagatacagacaaatacatcgttataaccagtattctggaaactcccaaccatctcttctttatatctctacaaggattatacgataagaaaaaaccgttctacggtatttacgacaaagaaaaacatattacttatatgaatgatgccactgtggggctgacagatgacctgacgcatttcatgcctttctatcccatcacttgtacagaagaaggagagtatgccactttattggagatagggaaaatagacgaatggatggataaaaatccgggaattgtccaagaaggaaagctaagctttttacaggaaatcaatgaagaatctaatccggtttgtgttatagtaggaccttgacaaccataaaagaacgctgctttcctcacggagagcagcgttctctttcttcaacacgttgaagataacagtatgctaaattagtcacgacctccacccaatgcctgatagagattgattacgccttgcatttcagtaaaacggttagcaacctgagttaactccgcattaagcagagtctgctgagccgtcaaaacttccagataagttgtattcccatgttgcatcagcaaagaggtactttccaaagctttatttaatgaatttatttgtttatcataataagctgatttatcacgggccgtctgatatttcaccaaagcctcgttcacttcacttcctgcattcaacaaagcctgttgaaaactcagttttgcttcttcttgctgagctttagctatctttagctgtgctatgttcgcacctttattaaaaagtggctgggttaacgaagctaccgccgttgcaatgaacttgcccggattgacaatcatacttcctgcagaattagtccatcccgcacttccacttaaaacaatagaaggataaaaggcggaacgagcctgatttgtggcatagaaagctgcttccaacgaacgctccgcactgcgtacatcgggacggttggcaagcatttgcacagggatgcctaccgggaaatgttccttcaacatgtaagagctgtcccatgtgcccgtcctcttaatagcatgaggaggttcagccaacaacaacgacaaactgttttctacctggttaatttgttctttcagatcaagaactgaagtacatatagtatagtatgtagcttccatttgtgaaacggcagcttcatttgccaatccggcttccatcagagcacgggtcgcatctacggtttctttccaagacttttcagtccggacagagatggccagctgattgtccagcatcagcaaggtatagtaagtattagctataccggctatcagctgtgtccggacagcctgtttatagtcacggctctgttccagcaatgctttcgcctggcgtttcgcattacggatacggccgaaaatatcaatttcccaacttgccgcgactggtaaagtataagtttgtgcagcttttcctttgtcaaaactacttgctgtcccctgaggtgacagagcgaaagaaggcagataagccaatttggctgacagcatagcagcttccgcctccttcacacgccattgtgctgactgcaaatccgtattgttccgcaagccttgctctatcaattcctgaagccgcggatcagtaaaaatctcctgccagctcagattgccgatattatccacggtatcagcaaccgccacctcttccccatacaaattatcgggcacttcggttgcaggtttatatttggtatatatgccgcagctactcagtgtgagtgctgcgacagtcagagtgatgatctgttttttcattttttctcttcgtttttgctttcaatgtggtgttgtctttcttcttttgcttctacacattcctcttgaatctgccaatcggccgccggctgaaactgaataggacgtaccttttcctgtaaatattggaatacgataaacaaagaaggtacaataaacagcaacgccagcgtaccgatcaccataccacccacagtacctgttcccagtgaactgtttccattagcacctactccactggcaaccatcaacgggaacagaccgaaaatcattgttccagccgtcatcaagataggacgcaaacgggctttggcggcagaaagtgcggcggaagtcagactcatacctgccttacgacgctcggcggcgtactcggtcaacaaaatggcagtcttagcaagcaaaccaatcaacataatcaaaccagtctgcaaataaatattgttctccagtcccatcatctttgcaaacaggaagctacccatcaacccaaacggaacagacaacaacactgcaaacggaatgaggaaactttcataaagtgcacttaaaatcaggtaaatcatcaagaaacagatagcaaagatgataatggtagtacctccttggtcggtctcttcacgagtaataccaccaaaatcgtacccaaaacctttgggaagtgcctgtacggcagtttcctgaacggcacggatagcatcaccggtactatacccttcggcaggcattgcatttacagcaatagagttgaacatattaaaacggctcaacgattctgccccataactgcgggtcaatgtcacaaactggctgagaggagccatctcgccattagacatacgcacaaagatattattcaatgagctttcatccacacgatatttcggatctgcctgaatcataaccttatacactttagaaaaacgattaaaatttgagacatactgcccaccataatagccagacaatgtgcttagcacagcatccggagtgataccggcacgcttacatttggacgcatccacttctaccgtccattgcggataacggatatcaaaagtagagtatgccatcgcgatctcgggacgttggttcagagcacccagatattgttgagtggtattgaagaaagtgcccacatcaccaccttgtttatcctgcatatggagttccaacgcattacccataccataccccggaatcatacccggagaaatagcaaatatactggcatccttgatatccgccgtacgaccatacacttgtccgattacagcctgaacatcattttcctttccttcacgctcatcccaaggtttcagcttcagaatcaacataccaaaagaattaccctgtccggctagcagaccataacctgccacacgctgcacatgcagcacctgaggaatatccatcatgcgcttttcaatacgcatcattacgtcattagtcgtttttaatgaactacctgccgccgtgctgacattcacaaatacaaccccctggtcttcatcaggcaccaaactggttttagttgtattcattaagaaagccaatagtactaccgaggccacaagaagtgtccataccatccatttgcgtttaataaagaacaatacccctttcttatatctttcaatcattgcatcgaaagcagcattgaacgctttacggaaacgtgctgcaaaattatttttttctgtcccatcctcattgatatacggtttcaagaacaaagcacacagcgccggactcaaagtcagtgcattgacggcagagatacctacggcaaccgccatagtcaaaccaaactgagtatagaaagtaccggaagttccactcataaacgaaaccggaataaacacagccataaataccaacgaggaagaaatgaccgcattactaatccccttcatcgcatcaatactagccatataagaagaacgataccccacatcaaaacgcgcctgcaccgcctcgacgacaacgatagcatcatccaccaccgtaccgatcaccaacaccaaagcaaacagggtaatcaggttgatactgaatcctgctatggacataaaagcaaatgtaccaatcaaggatacaatgatccccaccaatggaataatagtagaacgaatatcctgcaagaatacatatacaattaagattaccaaaaaaatggcctcaaacaaggtctttatcacctcatgaatagatgcatacaaaaagtcattggagctcattacctgaaccatctccacccctttgggcagatctttctttgcttcttccaaaaaggcatcaatattattatttacttctgttgcattagatcctgccgtctgaaaaatcatacaggaaataccaggatgaccattcatagccccgtgataggcataactttcctcgcccatctctatatcggcaatttctttcagcttcaacacttcgccattatccgaagaccggatcacaatttccccaaactcttccggagtaatcaaacgacctttgtacttcattgtatattgataagtttcatcagagttttcgccgaatgagccggtagccgattcaatattctgttcagccaacacttgtgtcacatccgatggaatcaatttatactgggccatcacgtcaggcttcatccagatacgcatactatagtcaccacccataatcatcatatcacccacaccctggatacgaagaattgcaggtttcaaattaatactgatatagttggacaagaatttctcatcatacgaatcatccggactatatagtgagaacatctgcaaaatactggtctgccgctttgaggtagtcacacccacctgagtcacttcggcaggaagctgtccggtcgccttggatacacgattttgcacattaacagccgccatatcaggatctgttccttgtttaaaatacacagtaatatctacaactccggcatttgaagcggtagaagtcatataagtcatattttccacaccgttaatcgcttcctccaacggagcgataacactcttctgaagagtttccgcactggcaccgaaataagaagtgcttacctgaatggtaggcggagctatatccgggtattgctcgacgggcaaagtgaacaacccgataatccccactactactatcgaaatagaaataacagccgacaggatgggacgttctataaaggttcttaaattcattttcttcttagttttgttttactttaaccggagtaccttcacgcagcaagcctacgccttctgcaacaatgatatctccctctttcaatccatcgttcacgatatattcctgtcctccatttacacgggtcacactaacaggagctgattgtgccttgccgtccacgactttatatacatatgtaatatcctgaatttcaaaagttgtagcctgaggaataaccaaacttcctttcatcgtaaccggaaggatcacatttcccgatgttccgctatacagcaacccattcttattcgggaatacggcacgcagactcgcggtacccgtattacggtctaccaccccactgatggtttcaatacgccccttttcgccatacatagacttgtcattcaattgcagttccacttccggcatatttttcaacgcttctgctttggaaccatattgacgggtcagagccaacaattgattttcagtcatcgaaaaataaacatacatatccgaattatcagaaaccgtagtcaacggttgtggcaaactggcactaaccaatgcacctacccgataaggcaatgtaccaatcactccatccgcaggacttttcacttctgtatacgaaagattattgcgagcactcacctcctgcgctttcgcctgggccaactgggccttggcagtaagccatgaattttctgccgtcttcaaatcaaattcagaaactactttctttgcaaacaattctttcttgctatcgtatgtcaactgtgctgttgccaatccggctttcgccgattccacattagccacagcagtttccaatgccgccttataaggtacttgatcaataataaataagatttgtcctttacgtactgcctgtccttcctccacacaaagttgtgttaggaaaccggaaacttgcggataaatatcaatatcctgacgtccgcggatcgtagccgaataagtagtagacaaaactttatccgacggcgatactttcaataccgcatattccgcctccatttgtgcaacaggcgcctgtttacacgacgctgtcaaagcagcacaaccaactaatactattagtcgcatccattttctgttcaatgtcatcatattccaatcttttaatttcggacgcaaaggtagatggaatttctcaagccgacacattcaattattagtcaccattgttcaaattcagaacatatttcctattataacaaaaataatagttaattttgcatcaaaacaagaataaacatggaaatattgagtttaccagagaatgaaccgtttatcaccggaatagaagaaagtatagatatatgctccaatcagattatgaagttagcagacgcatctatttttcattgccgtagcggaaaagcccacatagaaattgatttgcaggcgtacgaagtgacggagaacacccaacttctgcttctccccggcagtatcttcaattgtacctgcgccagccatgattttaccgtttcctatattgttttttccgacacccttttcagggagatcacctcacgtctggatccctccttctttcactttctaaaagagcatccatgcattgtcatccctgaagaacgtgtaaaaccattcatcgggctcagcttggtcatgaaagatctttatgaagacagggataatagtttccgcattcagatcttcaaaaatttcattcaaaacttcattctggacttctatgacaagacccaacacctgttcctgcaaaaaaagaccgaaggaataaatcgtcaggaagagatattcaaacgtttcatccaattgattcataaacattgtaccacccaacgtgaagtatctttttatgcagccgaactgttcatcactccccgttacctttccacaatcgtacaaaacgtatccggcaacacagccaaaagcattattgaccgacatgtaattcttgagattaaagcattattacaatccacgtccctaagtattcaagagatctccaaccgattatctttccctgaccaatctttttttggccgctatttcaagaaacatacaggcaaatcccctcttcaataccgaaaccagtcttaaaacaaaaaaagctgctttcaataaagaaagcagctttttcctgtttatatagggtgaattaattattcagccaatttattgtctgaacccagcacgttaataattttgtgcttgtacagtttttccatattgtcacgagccggacctaagtacttacgagggtcaaattcagctggtttttcagcaaatactttgcgaacagcagcagtcatagccagacgagagtctgagtcaatgttgattttgcaaacagcagacttggcagcctttcgcaattcttcttcagggataccgatagcagccttcaatgcaccaccatacttgttgattgtctcaacttcttcctgaggaactgatgaagaaccatgaagaacgatggggaatcccggaagtttttccattacagcatccaatacttcgaatgccaaaggaggaggaaccatacgacctgtagcaggatcaatgtgacactgttccggagtaaatttgtatgcaccgtgagaagtaccgatagagatagccaatgagtcgcaacctgtacgagttgcaaaatcaattacttcttcagggtcagtataagtatgatgatcagaagaaacttcatcttccacaccggccaatacacccaattcaccttctacagttacatcaaactgatgagcgtagtcaaccaccttctttgtcaaagctacgttttcttcataaggcagatgagaaccgtcgatcattacagaagagaaacctgagtcgatacagctcttgcaagtttcgaaagtatctccgtggtccagatgaagaacgatttcaggttttgcacaacctaattcttttgcatattctacagcaccctgagccatataacgcaacaaagtagcgttagcatactgacgagcaccttttgaaacctgcaaaataaccggagattttgtttctactgcagctttgatgatagcctgcatctgttccatattgttgaagttgaatgcaggaattgcatatccacctttgatagccttagcaaacatatctctagtgtttaccagacctaaatctttgtaattaaccattgttctaatatttataattgttagtgaattaaattccactgcaaaagtaatcataaatgcgctaactatggcaagttcacaccaaaaatatctcataaaaaatgattttattaactattttcttcgcttgaacgcataaactaattacattgtaatgtctaccttacaatactataaaagaagaaaataaggggtttagaagaaaaaatagcccgaagttttttctatttcaaagaaaagccgtatctttgcggtccaaaatggaccattacacccaatttgtttaccaaataagtaaaataataacaataaaagaatatactgaaatgaaaaaaggtcttcatcctgaaaactatcgtccggttgtatttaaagatatgtcaaacggcgatgtatttttgtcacgttcaacttgtagcacaaaagaaaccatcgaattcgaaggtgaaacttatccgttggtaaaactggaaatttctaatacatcacacccgttctacactggtaaatctaaattggtggatacagcaggtcgtgttgataagttcatgagccgctacggtaaccgtatgaaaaagtaaattgtaacttacacataagtttcaatataaaaaggctgcaaactcattgagttgcagcctttttatattgaaacacattgcactccctttaggggaatgcactaaactttccttctttccattcatatatcaccggctctttcttgatatacactgccaatttttctctttctgtctttgccagatattccggagtagtataagtaaaagagatgattgacttgtcctcagacaaagtagctttcaccagttccatatctgctttctctctaatcgcaacataagcctcatcagtcagcgtatctaccggcagataaaaagcctcgacagaaggaagccggataaaatcactttccgccagttgctcccaccgtgtactataaaaacgaatttcactatcacaaaccggaccacaaactgtattgatcacacaaatcacctttacggaatcattcaagggcaacagtttcatttccatagaactacttcccgtggtctgcagaaacaaaaaatcgtcagtcaactttttcagctcggacacctttccaaaacggttcttgacctccgccttcatattacttgccagaaaatccacacaatcctcgcgatttacctttgtcaataaaggagctatcgaatcaggcatagcgataaagagagttttcatatcctgagcgtgcaacgaaaacacgcacaacaacatacctattataaataaagtctttttcatcacatttttaaattaaaatcccccaaagatacatattttgtcagcttattcccaaccgcattatatttttttctatttttgtcggactaataaccaactaaacagaaaatgctatgtatttacacaaagagttagaaactctaacacggccggaaatagagaaattgcaattggaacgcttgcaaaagactgtccgtcattgcatgaattcccctttctataaacaacgatttgccgagagtcatctgagcccggaagatatccgttcactggatgatttacaaaaaattccgtttactaccaaacaagatttacgtgatacctatcccttcggactggcatccgtacctttggaaaaaaccgtccgccttcactcatccagtggaaccaccggaaatcccactgtcattctccatactcaaaaagaccttgacgaatgggccaatgcagtcgcccgttgtctttatatggtaggattgcgtccaggtgatgttttccaaaactcttccggttatggcatgttcactggcggactaggttttcaatatggtgccgaaaggctgggaatgttaaccgtacctgccgctgccggaaacaccaagcgccagttaaagtttatctcagatttcggaaccactgccctgcatgccattcccagctatgcagcccgtatgtatgaggtaatgcaggaaatggggattgaccctcgccgtgataccaaactgaagacattgattatcggagcagaacctcactctgaagaacaacgccgccgcatcgaagatatgttaggcgtaaaagcttacaattctttcggcatgtccgaaatgtgcggtcccggtgtggcttttgaatgtcaggaacagaacggcctgcatatatgggaagattattatatcgtagaaataatcaaccccgacactttggaacccgtacccgaaggggaagtgggtgagctggtgttgaccacgatcaatcgtgaagcgatgcctttactgagataccgcacccgtgaccttacccgtattctgccgggcgaatgtccttgtggccgtcatcacaaacgtctggacagaatgaaaggacgcagtgacgatatgattatcctgaaaggggtcaatatcttccccattcagattgaaacaattttgttacaattcaaagaattgggcagtgattatctgattacacttgaaactgccgaatcaaatgatgagatgaccgtagaagtggaattaagccaactgttcactgacgattacgggcgtctgcaatcattgacccgtgaaatcactcgccaactgaaagatgaaatattagttaccccacgtgtgaaactggtacccaaaggaacactccctaaaccagaaggcaaagctgtccgcgtgaaagacttacgtaaaaccttttaaaaaataagtttatgactatacaacaattatccgtcttcattgaaaataaatcggggactctacaaagggtattgaacttattaaaagaagcaggcatacaactgattgcctccactattgccgatacagtggaatatggcatttaccgtatcatctgctcggaacccaaacgcgcatacgaaacactgaaagaggccggaatatccgtggcgctctctgatgtgttcgccatcacactggataatcagccgggacgggcagcggacgctatcaccattttcagtgaagccaaaataggaatcacttatctgtattccttcttgttaggaaacaaaggcatattgattttccgcacagataatcccgacagagcaagagaagtgattattcttaataatctctctttcgtagctgagaaagatttatcaacgctgatttaaaatatacatcccccgtagagcgtaagcattactccctacggggaatatagttcttatcctctgcgtttcaagaagtccgtaggactttccccgaaatattccttgtaacactttgtaaaataagaaggagaagtaaaacctacctcatacgttatttcggatatggttttctctgaagaggccagcaaggaagcagctttctttaatctggcaatacgtactaattcattgggagaataattggtaagcgccttaatcttacgataaagctgcactctgcttaatcccatcttactgcctaaatcttccacacttaattcagaatccgccaagttttcttctatcagttccctgaaacggtcaacaaagcctttatccacgtcgcttaccgattctttagataaagtagtcttatccccgaagaattgtttcaaccgcttatggttatccatcagattacgaagacgtaccagcaacagtttggaattaaagggtttggagatataagaatccgccccacactcaaatccctgtatccgctgttcatccaacgaacaagcggtgagcaacatcaccggaatatgggaagtctgcaattctgttttcaactttctgcaacactccaatccatccatcaccggcatcatcacatcacagattatggcatcgggcacatatttcatggctttctttaatccggcacgcccgtcgggagcctctatcactgtatattcttcttttagtaatgacttcacatagtcacgcacatccgcgttatcatctattatcaagatacattctttattctcatccggaatctgctcttctgtttccatatcctccagctcctccaccaccgtctgttgtgtaatgcgcggttcctgcacgaggtctgcagacggctcttccactactgtcatagggatatccactgtaaatacagttccttttccttccacactatccgccgttatctctccaccgtgcagttcgacaaaagcctttgccaaggcaaggccgatacccgaacccgcatggtttacatcaatctgataaaagcggtcgaagatatgccggatatgttggacagagattcccgaaccagtatcagcaactaccagacgggcatatctcccaccttcctccttcgtcaaagtagaaagtgtaaccgtaatggttccattctccggtgtgaacttaaacgcattggacaataagttgaaatagacacgttccattttctcggcatccactgccatcagataatctgcccggtcatcattcacctccaatacaaaatggatatgctttttcaaagccaaagtttggaatgaatgactccattcctgcaactgcacccgtagattcatattggctcttaccaattccaatttatcattttcatacttacgaaaatcaagaatctggttgacaagcctcagcaggatatgtacattcttatgcaccacctttaataaggattgttgtctgggagtcaatgccttatcttccaatagttgctccaccggatcggcaaccaaagtgagtggagtacggaaatcatgagagacattcgtaaagaaaaccagtttggcatgggtcgcctcttccaattgtttggaaaggctaatcagctggtcacgttgttcctccaattttttcttttgacgggacagttccatattcatccggttctttgtccaataggcacggacaataatcgccaataaggcagcaaacaataacagaataatcagacaggcatacagaaacatggtttgggcagagtatctggacagatattcgttcacctgattattcagccgttctatctttccatcctgttcggtaatgtggtctgtctgcaattgcatcacccgggcattcgttttatcaaccaaagctgttgataacttagtatctctctcatacgggcgtttctccaaaatatccatcgccacctgtactaccttgtcacctccggtcggataaataaatgtagcatccagcaccccgtttatgatctgttccactccatattccttaccgggcagcgcatcaatgccgacaaacaacatttccttttccaactgttgctgacgggcggacaaataggccccgatagccatgcggtcattctgggcaaacaccaaatctatattcttattagtttgaaacacggagtccattttctcacctgccacactttgcagccaggctccatctacgctggcagttatttcaattccgggctcttctttcagcacatccgtcaaccccttatggcgttccatagcaggcgtggagccttcaagccctgttatctccaagactttcccttttccatgcaggcggttgagaatgtattgccccacatcttttccaatctcataattatcggctcccacaaaagccgtgtacttgtccgacagaatcttacggtcaatcaccaccacaggtattccctgccgataggctttctccacaacgggagtaatggctgccgcttcgtttggagcgacaataagcaggtccactttcttatcaataaaatatttgatatccgctatctggttccggttattgtctttcgcggtacggatttccacctccaccccgtcataaaataaagcttcacgtactatttcattattcattttgtgccgccactcatcatcactgcattgcgaaacaccgatgcgataacgcgtatgcttctgagtgcacgacatcagaattccggcgaggcataaaatggacaataaaagatagtttttcatgttcctcaaaatatttatggatacacaaagataaaaggtaaccgctaatgaaacaaacatctgctggaaaaagagcaccacacacgttggaaaaatcatcgaggactccattcctgtttcttcgaaaagtttcttcagacatttaaaatggatttcaggcatctataatatgcctgaaaatcctatagcttctttcataacgccccttagcaggtttacccgttatcaaccaactgttccctcaaacgggcaggcaattcgggcatagccccattttgtgtacatacataagcagaaacctcaaccgccagtttatgcgcttcggcaaccgattttcctttcaacacggctgccacaaacgttgccgtgaaagaatcaccggctcccaccgtatcagctacttccaccttcggagtctctacaaatgaaatctcacccggagtaaagacatagctgccattaacaccacaagtaagtatcagcatcttcaaattatatttagccagcagaatccaacatttatcctgcaaatcaataccgggataaccgaacatgcggctcactgtgaccagttcttcatcattaatcttcagaatattgcattttttcatggagttgcaaagaatctccttcgtatagaatccctgacgcaaatttacatcaaagattttgcactgtccctcgccgtcgggcatggtatccaagaaacggttgatagtctcccgtgaaacgacactgcgctgtgccaatgaaccgaaacataccgaacgggtattacgggccagttcctccaaagcgggagtgaaaggaatattatcccaggcaaccccttcctttatatcatacataggtaccccattaggatccagttccacttgcacagttccggtgggataaggaattttttctatcaaataattcaatttcttgctatcaaagttctcaagtatctcattacccaatttatcatcaccaatcgcactgaccacacggctgtcgaaaccgaattgtgatacatgataagcgaagtttgccggagcaccaccaattttctttccttcgggcagcacatcccatagtgcctcacccattcctacaataatgttattcatggtcatttctttatttttaaggtatataataacaagtaaatcactcctacagtcattacggcaacagcgccgctttgtcccatcgcgtcactggcaactcccatagccaacggaaataccgtaccaccgaacaatcccataatcatcagtccggaaacttcatttttcttatcgggcatcgcaaacaacgcctgcgagaagataatggaaaacacattggagttaccgaaaccaatcatggcaatacaaatataaataattgtttccgtatggaaaataaaaagtcccgccattgccagtaacataaacactacactgagtgcaaaaaaggacttcgcagaaaccttttgcaaaataaatgctccgagaaaacatcctaccgtacggaaaataaagtaaaggcttgtcgcaaaaccggcctcagccaatgtcatatccaaacgctccatcaatattttgggagcagtcgtattggtacctacgtcaatgcccacatgacacatgatgccaatgaaggatagcaaaataaacggtttacccaacagagcgaaacaggctttgaaaccggatgccttatcgggcttctcctcctcgataggtgtggaacctaacaaggcaatagccaaaacagctataaccatatagacaggaaacagcaccctccatcccaatccgaaagaaggaatggtctgagtagctccccacatggcaatataaggggccagaaaagaagctatagcttttacaaactgtccgaaagtcaatgtacttgccagcttgtccccggcaatgatattactcaacaacggattcaaggacgtttgcatcaatgcattaccgatccccaacaaagagaaggaaataagcatgagggtatagccgtctccaaaaacaggaatcaataaagaagcaaaagtgattatcaaactcaaaaggactgtctttttgcgccctatcttattcatcagaacacccgtaggtacggagaaaatcaggaaccagaaaaagaccagtgaggggaagacattggcttgcgagtctgtgagatccaagtcagcctttacatagttcgacgcaatccccaccaagtcaacaaaccccatggcgaagaaacaaagcatcaccggaattaatttggcatataggtttttattgttattcatggcttttattttttcattttttatttcttcatcttattcacctgacctatttatagacctaatttatatattgtgaaatctgagattttcatctcccctccttcactataaaaacgtaaggagttataaggttcattcgggaataccagattagtcatggcaatgcgaccgccgtcaacaaacagttccacacttccattatccacaaacacttgaaccttatgtcctttcgcggtgtttatcggagcccaagtacccaaagcaaaatcatttttatagttcaccgtcacttctttataccgagcataactctcttcggtatccaaatcatgcggctttaccttcttgccaaagtctacaataccgctttccgcccgatccattaccacacgtccttccgcagcatccagataaatcctcactttctcacccagactattcagcaattcaaaaccagcttctttacctgccgatgttaattgcagttccagttcgaaagcgccatcattattttcaaaaagtgtttcaaaacgcttctcaccattcactgtaaagtcatccagttttttagaatccttccgtaagttttccgtctcttttaccggtgcggcactcagataaagctgcttgtcctcacctgtatacagactcaattcacgtggcaaagcattggcactacggaactgctgtataggagtatagttagcatattgccagttgctcatccaaggaacagcaatgatacggctgtctgtatttgagaagcaaacggtggcataatgatcttttccccagtcgagccacttcaccacctcgggtttcgtatcgcatacaaaccgatgtccgtcaaaatcgcctacaaaatacatagtaccactgcctccataaacaaatcccggattgatatttacaatcatcacccatttcatcttagaccggtcaccatctacaggcaactgaatgaaatccggacattcgaactgattgggctgaggaccaaatccttctccaaattcactcatgtattcccactgcttcaagtttgcagatgaataaaaacgcatattcttgtccgcactgacaatcataatccacttctgttcgggctcataccagaatactttcggatcacggaaattctgtagcccgtcaaacggagtaaggaccggattttgttcatattttgtataagtgcgtccattgtccgtgctgtatgccatactttgcacctgactctgtccaccgggtacattacggtgcgaagtataaaaagcaataattgtattctcaccgcagcctgcgctgttatttttatccacaatagcacttcccgagaagatatgccccaaagtatcacggacaatcgccgggtcgaggtgttcccaatgaaccaagtctttgctcacggaatgtccccaatgcatattcccccacatagagccgtatggattatgctggaaataaaggtgatattcaccatctttataaaccagtccgttggcatcgttcatccatccataaagcggagtgtgatggtaaagaggacggaatttatctctgtttgttgtatcaaatgtatccgagactttaatgctgtcccaacaaagagcatcagcggccacattgcggatagtcaccgtagcgcccccctcatcttgagtcaaagcgaaaggtacataatattctacactgtcgatagctagacgaatatccatttcagtatcagccggactgcctgtttccaatttcacctgtccttccttactgccttcctgaatcggaagcaacaaatatttagcgggatgggcaatatgcacgatagtgactgtatccccctgatgttcgaacaccagattatttttttgtgactgacaggaaactgtgcctgctgtaaaggctaaacctaatacaagattaacaagatttgttttcatggaatatatggtattaaaagttttattattaaaatcagaatgttattttcgccgcaaattctacggtgaacggacggatatagctacctgccatccatgcgccattatatgctgccgcattttccttatcaaccaattccgcccccgagatgctgcccttagcaccggtctggttcaagaagtttatcacagttccgcttaaggacagatgtttgtttacattccagttaattccaccgaatgtttcccaacgaccgttgaagtaataagcattcttgatattcgcatacgttttgctgaagtaacggaaacttgcccataccttcaagtctttggtaatgttgtaactagggtccagctctatcagcaccttcggaatttcagtaacgatattgccggtggcattgatacccgatgttgtcccgtcactaaaagtcactcccgtttcatacttcttatacttcgggctttggtaagtgaacaggaaatggaaatcaaatcctttgaaaggtttcacaactgcatccgtcgtccatcctattgtttcaatatcataactcaatgcagccgccttaatatccttatcattattcggattaatcaggttcaaggtagagttgttgttagtcttggcaatgtaactgaataatgaggtcaggctaatccagtcattattgaaataaatacccgcacgccccaaaggaatcgtaatcttatctacattcggcatctcggcaggagcaaagttcgacatattcggacgctgggtattgtaggtaaaatcggcggtaaagccaaattgcttcgtcattttataagtagcggccgccgtgaaagccatgttcaaccaatcgtagctgaaatgacggggagctatcttcgtaccatcggctgcaactgccccgatatgataaccggcaaagcggcctaccggattgccttcggcattatataccgccaggttctttcctgccagacgctggtactcgaagcgtgcgccataatacacattccattgatcagtgatatcccaatcgtgagtagcataaagagccaatttgttttcatgtcctttgtaatattcggaagcattctggttcagattataataaggagtatttccgtaatgatgaatatccttcgtatcggcgctgtacaacatttggggatattcttctaccgtatggtcgtacatggtagtgttcgaagcatagtccacatcataataccattcgttcacccccacacgccaagtcatataatcatacttccgcgacaactcggtggtaaagaagaattcatctatattcccccggttgaaacaggacatacggctctgtacatatccttcataaggattcaaagctccatccagtcctttggtgctatagccgtcggccaatactttctgctccatagacatcggagtctggtacagataggagcccaaagcatggtcatacttcatattgattttccactccaacccgttatcccaccggtaacggttaagaaccgtcaactgatttcctttactggccgtagcatcatacagactgatctttttcatctctccggtacgcatgtccatataaaccatatccgatacattaggcagataggaagaagtaccgagaccgaaaccgggaatctccttcacactcccatcgcctacataaataaatggtgcaccggtggtagcattggacaaccaatggctgttgctgtaatggtagatggcagagagctgtccacgtccttcattgtagaacttagtcaaagcaaacttatagatctgagtccggtcctgatattgtgcaaaacgtagtttgaacgaacccggatcaaaattctgatagatactgccgctgtaaaaccaatcttttccgatgcttccattcagattgaagtcaaattgctgtttaccgaaatgattggtgccgtagttcagcacgccattcattttcttctctttattcaagccgagttccgtaaatgaattgacagcataacctatattgccggtagtaatcgctgtttcggaaatcttcaacaatccggtatgtcccaagctgctgtctccgcgccaatgcgtgtttacattatgaggattcgaattatatactacaggaagaccattttcgagtacattcacatcaccaccgggcagaccgatagagatttcacgaggaccattggcactagccgcattcaacatgacattgcgattgccttcctctttcgaattagaggccactttggtagaatctttttgtgcataaccattcaagcaaacggcggcaagtaaaataatgaccgcgcccatccggttcttttgttgatttttgttcatagcattaaatgtttttaaaagtttttctgaggcaaaggtaggggacagccggcaacctctataaaacatttgttacagctgctggcatttttgtttcattgcaacaaaagtgacggattatgtaacatttctcgtgaaccataggccttttcacctctaaaaacaagttcatcccaattttccttcagccttcagtttttgctgttttttccccatttcatcgaagaaaacacctgaaggattatccttcagcctactatcagcccgcctttaggcaagcaagagaaaaaaaatcccaattcctctttttctatccgaagtatgccggtaatcagcataaaacacttacctttacaacagcaccaactgaaaagaaagacgccacaatgaaaggaaaatccctcaaaccttcaaggggaacatctaatttgcccgtacaagctcttttctcctatgaattaataggtttttccagtatgattaagtacttttgtcctgaatactaagacagactccgatggcagactgtacaatccactatagcagaccgtacagtccactacagtaaaccgtacggtccattgcctgcgtctatagaagttaatagaaagaatccccttagcgttcagcaagaaacgacttaatctccctattaaaaagcattaaacatggcagcaaagtatgatttcaaaacctcccccgacatacagggagagaaggaacagcccaccctgtatccacaaattgtagtatcgggcacaaaaagcctgaaagacctggctaaagacattgcccggcgttccaccgtccacgaagggaccgtcgtcggtctgctatgtgacctggaaagcattatcgccaattacctggcagacggttataacgtaaaactgggagaactgggtactttctcggccacactgacttgccgcaaggtaacggacaaaagcgagatacgagccgcatcggtacattttgacaacataaagttcaaacccacccggaaatttcgtaaggaggtacgaagcaaaggaaagctggaacgggcagaatatggtttccggacctcctccacccgatattcagcagaagaacgctttgtacggctgacgaattatctgaaagagcactccattatcacttgcaaggaatattgtgccttgacagggttgctgaaaacaaaagccggcagcgaactacgccaatggagcagtgaaaagaaaatagaaagagacggacgcgccccgcacgtgatatacagggcgatgccggaaagctgaaaaggcgtcctttcatttgctccccccctcccggaacctttattctttccgggtacggctggtagctatgagatacgcccccagcagaatcagcggcacactgagccactgccctatattaaaagtcatatccgcctcttcggcaacctgcggattcttcataaactccagagcaaaacgagtgccaaaaaatataagcaagcttactccggttattaatcccactcttttttgtaaatggtatgtatggtacatcacccaggcagttacaccggcaaccaggcaatacagcatttcataaatctgagtaggatggcaaggcaaaccttcatacagctgatgccactcccgggaacggacaaattcaaatccccaaggcaacgtggtgggatatccgaatatctcggaattcattaaattacccaaacggatacagaagcagacaatcgccacagcaggtatcatgcggtcaaacaaccaccacacacttttccgggttactttttttgaataccacatcagagccagaatgatggcaaacacccctccatgacttgccaacccacctttccaaatcttgaatatttcaacaggatgggcgctataatagtcccattcataaaataaacaatgccccaaacgggcgccaatgaccgtactgactatgcaatagacgaaaagcttgtccacccagtcttccggatacttctcttttttgaataaacggcttactatttcataagctaatatgaaaccaaggccccacatcagcccataccaacgcacttcccaactacctactttaaataagataggatccacatcccatacaatacttgctatcattgttctatttctttgtttatgagcacaaaggaaataaaaaaaactcttctccgaaataaaacggagaagagattttcagaatatcgttctttttgaggaaacctctttataccaaatgcgcaatcagttcctcacggtcgccgcacagcagatcaattacaggaacttcaatcatggtataacatccgggctgctgtttcatggaggcacgtgccacgcacaccagcacctgtgcggtaagagccggattattaatcttcatgtcaaactcgaacaactgattatgggtcttgcccgatacccctttacgaaccaggttaacgccatgacccacgtcattcaaatcgtccacacatggaacttgttttacatgtgtctcgtcatttacaaaataaggatccgacttgatggcggcttccacagtcttgaagtccgcaccttcctccaattccacatacaccatacggcgatggataccggtacccacaggaatagtcatggacaaagcatccttcactccatcaatggcacggactgctacggaatgccccatgctgcgtcccggaccgaaattggtataagtaatgcccttcggagcgatggcttccaacagtgtacgaactacagaatcgcttcccggatcccatccggcagaaataatagcgacagccttaccggcctttgccgactcatccaatgaacggcggagagaagtgatttgtgtatgaatgtcgaaactatctaccgtattgatacccattgccagaatctctttagcatatttttccacgctacgggtcggagtagccagcacagccacatccacatctttcaattcctttatatctttcaccacagcgtatgcttccaactcggcaggcttgttttccgcaccgctacgacggacgatacctgcaatctcaaaatcgggagcagcttccaaagcctccactacatactgaccaatgttaccgtatccaaccacggccgctcttatttttctcatcttttattgggtttagtttactattatctgttaattcgctgcaaaaataaacattttgcctcatttttttgttcactacgacctaataatttaaaaatattcttgccgaacttataatttaaaagatagatgtcctatttttgcaaagaactgtaaattttcaaatgaaacaaccatgatagaatatattaaaggagacattgcggagattactccggcaacggtagttttagactgtaacgggatgggatatggcatcaatatctcattgaatacgtattcggccattcagaatcagagcaatacgaaattatatatttatgaagcgatccgggaagacgcctacgtactctacggattctcgaccaagcaggaacgggagttatttttgttactgatttccgtatcgggcatcggcggcaacacggcacgtatgattctgtcggctttatccccttccgaactgtgcggagtaatcagttccggtaatgacaagttattgaaaacggtgaaaggcatcggcctgaaaactgcccaacgcatcatagtggacttaaaggacaagatcgccacttcgggcgtggaaacagtgaacagtgaaatgtttgccaatccggccaatacagaaattcatgacgaggctgtctccgcactcaccatgctgggattcgcacaagccgcatcacaaaaggtagtggctgccatactgaaagaggagcctgccgccccggtagagaaagtgatcaagctggccttgaagcgattgtaagggctatacatgaaacaagggacacggacaatgcggactttggggaatcttttcaaaatccgctttgtttgtgttccgattcacatcacttctcttcctcctgttcctgcattttgcgggttacaaactctattttcaagttcgcttctttcttatctttacggatttgttccatgccggacaggatgcgcgccaattctgtcaattctgcaatcgccttacggtcattgggttgcatagccgttttataagtacggtctccgataaactgaagttgaatattcttatctttattcgctacaataaaagcgataacgccgccgtcttcccccatcttataatcggccttctcgattgcacggcccaagtcagtggtttcatagctgtctttcgaggcgggagtttcggcaaaggtatcccccacactcactttcaccgccgtgtgatgcaacgtgccgcctgcacaataaatagaggtaagggacatttccccctgctcgttcacttgtccgcgcaagaatgaacggcctatattcttttctaccgtctgggtaggataaaaatagttacccacctcctgatatgcagtatctttctcaagaacaaaattacctttgacggaatccagctgagcttgtctcaccaccatcatgctatccaggtaaatcagacttttctgctgttctttcaaatccacctgctgcatcagcttgactccctgttttctggcttcaaacgctttcggataaaggatgcggatactgtctatctgcaatttggcctcattaaagttctctttttccaaagccgcttcagccttacgcaaattttcttgcgctttcttctcgccgccatcatcacaaccggccagcaacaaggcaaataatgctactaatcctatctttttcatgtacttgatcgttttatatgcaggcaaaaatacaatttaattgcgtgatttctccttatcctgcgcaaaaaatcgtaaatttgcccctctttaagatgaatatggaactaaaagaacattttaataataagatattcaagttaatctccgaaacggcagacgaactgggattggaatgttacgttgtaggaggttatgtacgagatatatttttggcacgtccctctaaggatatagacgttgtagtagtaggaagcggaattgaaatggcacaagccctcggcaagaagctgggacgcggagcacacgtttctgtttttaagaatttcggcacggcacaagttaaataccatgacacggaagtggagtttgtcggtgcccgtaaagagtcgtacagccatgacagccgtaagcccgtagtagaggacggcaccttggaggacgaccaaaaccggcgcgattttacgatcaatgccatggcagtgtgcctgaacaaagcacgtttcggtgaattggtagatccttttaatggactggacgatttgaaagagagaactatccgtacgccgctggacccggacatcactttcagtgacgatccgctccgcatgatgcgttgtgtccggtttgccacacaactgaatttctatattgatgacaccactttcgaagcactgtcacgtaacaaggaacgcattcatattatctccaaagagcgcatcgccgacgagttgaacaagatcttgctcgcccccataccgtccaaaggctttatagaactggaccgctgcggactgttacctttgatttttcctgaactggtagcgttgcaaggagtggaaacccggaacggccgtgcccataaagataacttctaccataccttggaagttgtggacaatatttccaaacataccgacaacctatggctacgttgggccactctgttgcatgatataggcaagccacgtaccaaacgctgggaaccacgtataggatggactttccataatcataactttatcggtgagaaaatgattccggacctcttccgcaagatgaaactgcccatgaatgagaagatgaaatatgtccaaaagttagtcagcctgcacatgcgtcccattgttatcgcagatgatgtagtaactgattccgccgtgcgacgtctgctttttgaagccggagatgatattgacgacttgatgatgctgtgcgaagcggacatcacttcaaaaaatgaagcacgaaaacaaaaattcctggataacttcaaactggtacgccagaaactgaaagacctggaagaaaaagaccggatacgcaatttccaacctccggtagacggagaagaaattatgcggatattcgacctgcagccctgccgtgaaataggcagtctgaaaagttctatcaaggatgccatactggatggaatcatccctaatgaacatgatgctgctttagaacacatgttgaagaaagcaaaaagcatgggattaacacccaaaaacttataagaaattgaccatacactataccaaaggagaagagtgggccaataccctgtcacatggtgttggtatcctgataggtatcgccggcggcggttatctgttgcttactgccatgaaaagtggcaatccgtgggcaacaggtggcatgtggctctatctattcggtatgctgtcttcctatatcagctccacctggtatcatgccagcaaaccatctcctcaccgcgaagtgttgcgcaaattcgatcatgcttcgatttatctgcatatcgcaggaagctattcccccatcatgctgatagccttgcgggaagcagattattggggatggggaattcttagtttcgtatggctatgcgccctcgccgggatcattctatgtttttgtaacctgaaagaacatagcaacctggaaacaatttgctatatagccatgggatgcagcatttttgtaggtttcaagccgctctgccaacatgtacctcctgtttttatttattggttaatcggcgaaggagtgtcttacatcaccggagctgtcttttattccttcccccaattgccctatatgcactctgttttccatctgtttgtattaggaggaacaatctgccatatgatggcattgtggtacattttataaccctcccatcttcaataagttatccgttttggaaaacttttatttattttttaaacagaaagtttcccaaaatgttatacctttgtagccgtccgacaaggtgaagttaaccccttctaagagggaatgccgtgaaaatcagcaacagtacccgctgctgtaattctcgttgaactgaaacaatatgccactacaaaactatttgcgggaaggcgttttaagggagagataagtcagaaaacctgcctggaaggacagccaagttttttaaattaacaattaatttttccaacaatgaattacgctgagatttgtattattaagcgtgatggaaagcgggaagacttttccatcagtaaaattaaaaatgcaatcggcaaggcattccatgcctccggaattgacaatgaagacaaactgattgctgaaattaccatgcgggttatcagcaattttgtatctccaaccatcagtgtggaagagattcaggatctggtagaaaaggaactgatgaaagtacgtcccgaagtggctaagaaatacattatttatcgcgaatggcggaatacggaacgcgaccgtaaaacgcaaatgaagcacatcatggacggcattgtagccatcgacaaaaatgatgtcaacctgagtaatgccaacatgtccagccatactcccgccggacagatgatgacttttgcctcggaagttactaaagactatacctataaatatttgttgcctaaaaaatatgccgaagcgcatcagttgggcgacatacatatacatgatttggattactatcccaccaagactaccacttgtatccaatatgacctggatgacttgttcgaacgcggcttccgcactaaaaacggaagtatccgtactccacagtccattcaaagttatgccactctggccaccatcatattccagacaaaccagaacgagcaacatggcggacaggctatccccgccttcgacttctttatggcggaaggggtacggaagacatttcgcaaacatctgaaaactttaaccgagttttatatagaagtagaaggaaaagaacccggaacagaggctctcaagaaaattgaagagaaagcatacgccatgacgcgcaaagatacacatcaggcaatggaaggattcatccacaacctgaacaccatgcattcgcgagggggaaatcaagtcgtattcagttccatcaattatggaacagacacttctcccgaaggccgcatggtcatagaggaactgctgaaagctaccatcgaaggcctgggtacccgtggcgaagtaccagtcttccccatacagatattcaaagttaaagacggagtatcttattccgaagaggactataagaaagccatggaaaatttcgaagcggcactggaaggcaacatggaattccaagctcccaatttcgacttgtttctgaaagcttgccgtaccaccgcaaaagccttgttccctaattttatgtttttggatactccttataacaaaaatgagaaatgggatatcaaggaccctaaacgttaccgctatgaactggcaactatgggatgccgtacccgcgtatacgaaaatatagcgggtgaaaaaagttcattaggacgtggcaacctgtcattcaccactatgaatatgccccggctggccatcgaagcacgcatcaaggcagaaagtctggaagaatcaggcaaaaaagaggccatagaaagaaaagcaaaagaaatattcatagaaagtgtacatgctttgtccgaactaatcgccgaacaattgtatgcacgctaccagtatcaacgtacagccttggcacgccagttcccgttcatgatggggaatgatgtgtggaaaggcggaggaaaactttcgcccaacgaccaggtgggggatgtattgcgtcaaggcacattggggataggctttatcggcgggcacaatgccatgatggctctttatggagaaggtcacgcacatagccagaaagcatgggatacattattcgaagccgttacggaaatgaataaagtggcagacgaatacaaacagaaatatcagttgaatttctccgtacttgccacgcctgccgaaggactttccggacgattcacccgtatggaccgccgcaaatacggcatcattcccggcgtgacggataatgactattatgtaaactctttccacgtagatgtaaaagagcccatcaccatcaccgagaagataaaacgggaagctcctttccacgccattacccgcggaggacatatcacttacgtagaactggacggagaagctcagaaaaatgtaaaagccatagccaagattgtaaaagtaatgcatgacgaaggcattggatacggttccatcaatcatcctgttgatacttgtcaggcttgcggttacaaaggggtcatttacgacaagtgccctgtttgccagagcgagaatataatgcgaatgcgtcgcattaccgggtatttgacaggcgacctcagcacttggaattcagccaagcgtgccgaagagcgtgaccgggtaaagcatggataatcagcatgaacttgttatttacctatcctgaaacaatagtcgacggtgaaggcatccgctattctatctatctagccggatgccgtcaccattgtcgcggttgccagaatcccgaatcctggaacccatcggcaggcactccgctcacaccggaaaaaatagaaaaaattatctgcgaaataaatgctaatccattattggacggaatcaccttttccggtggagatccactttatcatcctcaagaattcctggctctagtcaaacagatcaaagaagctaccggacaaaacatctggtgttatacaggatatacatttgaacaaatacaaaacgatgaaatgttaaaaccggtactggattatgtggatgttatagtagacggacgattcgagccggatttgtactctccttacttggaatttaggggaagcagtaaccaacgcatcatccgtgtgcgataacgctaaaagaaataaaaaaagggtgttttcttgatatatatcatgaattcacccttttttatgtttttcagcatctatttacttgctaatatcaagaaaagccgtacctttgcaatgtggttgtgaaaccaaatattaagttaataaagaaaagaacaaaattaggtattaagtattaaggtaaagattttaatttaaggtattagatttaggtaaagaaagattgatttagaaaggtattagcagcaagatttaaggtaattagaaaaagaaagttttcaggaaattagttttataggtattaaaagagttgtttttttaggtacaagagagaggataacgcaactgagacgagaaagatgaaaagaaccccattatggaggggggttcttcaggatgtgagcgggtttgataagaactttcgctctttttttatgtctttttttcaccacgggagaaaaacaatataaaaaacgcagatttccgcaaagatgattgattcaatctttgcggaaatccgtgcctatcggcattgttataaaaatgccgtgtccttttctgtcatgcaaacttagaacaagaatcgcatgatatcattaaagttcgcccaaatgagcaaggcaaacaatagaaacatacctaccatctgcgcatattccataaatttgtcactcggcttacgacgggcaatgatttcataaagcaggaataatacatgtccgccatccaatgccggaataggcagaatattcataaacgcaaggatgattgacagaaaagcagtcatttcccaaaaacgatgccaatcccatactttcggaaaaatacttcctatcgttccaaaaccacctacactcttggctccttctttggtgaacacatatttcatatcgttcacatatccttttaatgtatttactcctaattgtacccctgcaggaaaagattcaaagaatccatattcacgggtagtttctttataatcggccaatgaaagaaatgttgcccccactctaaacagtgagtccgtatgcacggtaaccgtatcacgcaatcctccacgagaataaaccatttgcatagcaactcctttatctccggtagtttccgcatcagcctgcatattatctagtttttccaccaatgcattccatgagttcaacatttcaccgttgaccgcaatcaaactatctcccttctgtataccggccttatccaagccaccgcccggtatcaccgagtcaacaacattaggaactaacgccgtaacaaacatcggatcatcctttgctatatccaacaagctgatctcaggcatatatacttcggtttcctttccatcgcgcgatacagtcactgtacgtgcctcagcaatatcacgaagcatatccatcccgaaacgctccaatggtttttcatctgcgcgaaggagaatatcaccgtcacggaagcctatttcccgagcacgctcattaaatttcataccatgagtcatgtcttgcagtgacacaaaagaatctccccaatggaataaaatcatggaatagatgaagatagccagcaagaaattcatcaagacaccacccaccatgataagcagacgctgccaagccggttttgaacgaaattcccatggtttagcaggctgtttcatctgctcggtatccatagactcgtctatcatacccgaaattttcacatatccccccaaaggcacccagccaataccatattccgtatcactgttcttcggtttgaatttgaacaaagaaaaccacggatcaaaaaatatgtagaacttctctactcttactttaaaaagacgtgaaaaaagaaaatgtcctccctcatgaataatgaccaataatgaaaggctcattatcaattgaagggcacgaatcaaaaatgtttccatctagctatttactattttataatttataattaacataattctctgtcaactaccatttaagatgacaaaagggataacgctacccgacgtgcctcagtatcagtagccacatagtcttcataagtcggttccttgatataagcaactttacccatagtccgttctatgacatcactcatacccaggaaagatattttgtctttcaggaaagcatccaccaccacttcattagctgcattcactatacagggcatatttccggcccgatacaaagcctcgtatgccaatgccaaattacgaaaacgtttagtatcaggctgttcaaaagtcaggtctgttatacgggcaaaatccaaccgttcgaaagaagatttcacacgctccggatacgaaaaagcatattgaataggcaaacgcatatcgggcatgcccaattgcgctttcacggccccatcctcaaactgcaccatagaatgaatgacagattgtggatgaactaccacttcaatttgctccggacgcattccgaataaccatttagcctcaatcacttcaaaccccttgttcatcatggaagccgaatcaatggttatcttcgctcccatctcccaattggggtgcttcaaagcttgtgctttggtcactgtttgcaactgctccatagtataagtacgaaacggccctcctgaagctgtcaagatcactttctccaaccggttatttatttccaggcactggaagatagccgaatgttccgaatccacgggaagtacagatgtatggtactgatttgccagtgcattaatcaactctccggccacaaccagcgtttctttattagccaaagcaatagctttacctgcctttatcgcatttatagtaggacgcaatccggcataacctaccatagaagccagtacaatgtcaataggctgtgattccacaatttgagagagcgcatccgctcctgcatatactttgataggcagatcactcaacgcctctttcaattgaaggtatttttcctcattggctatcactaccgcctcgggcatgaacttacgggcttgttctatcaataaatcgaccctgttattggctgtcagcgcataggcctcatataaatcaggatgttcctctattacctgtaaagcctgtgtaccgatagagccggtagaacctaatatcgctatttgttttttcataatgttgttaaaatacaatgtattttgagggatcaatcgcacgtcccttgtgccacaattcgaaatgcagatgcggtccggtagttttttcaccggtatttcctaccaatgcaatagcttcaccacctttcaccggatcgccttctttctttaataacgaaccacaatgtttatataccgacacaaaatcctgtccgtgctgtatctgaataacataaccggtttctgctgtataagtagacaaaatcactgttccatccaatgttgccaacacactttcatttggattagcggcaatatccactccgtaatgcctgttctccaagtcaaaattagaagacatcatgccacgtgtaggacgataaaaaatcaatccggaagcggcattattatcatcaacagccgtcagattatatcgttctgattcttcatattgcttgcgaaactcttcttcctgcctggtacgttccatcaaagaatcagaacgaagaatggtcagagagtcgatagattggactgtatcagcttttactttcccgctaaatatatcctgaatattcatgatatacatattctgcctcgtcaccacttgttgcaatgaatcggcccgcaaggcattggtcaccacctgcgcacgtacctcactgttcatatatcccggcaaataattacgtaaaggagtaaaaacaatgatagttgccgaaatcaggaaaattaccgttacggcagacagcaatacagacacaccattgagtttggaaacgtgtagtcccacaatctcctccaacgtattttcattggtaatggtcagtttatacttaaacttgaaattatgccaaaatgctttccttccttttttcttcatcgtgcgcatcttctatatttatatcaagccatcaggtacttcgaccgtcagcaaacgctttttcttatccaatttggtgataaattcctcgtgggcaggcagcaaaagttcctcaccacctttctcaatggcaaaaaggacattcatcgtactgtcatccaccgccacaatctcacccaactcaccatgattcacatcttctaccttaaaaccaataaaatagttccaagtaggtatatcatccgaatcttcctcctcaccgacatatttcttcgggaaataaacctctacattcgtaaacatacgggccttttccgaggtatccaccccttccagtttgactaaagcagtggtatctgaacgaaaacgatactcttcaataaagaaaggcacgaagataccgtctaacaaacagaccaaatactcacattccacacggtcaaaaatatcatccgtaaaagtgaatgagatttctccttttactccatgcggcttgttgaatataccaatcttgaaaacttcatcttttttaatcatgattgatttctctaaattctagtaatacgtgcgccaagcgcattcaaacgctggtctatattctgatatccccggtctatctgctctatattgtgtatgcgactggtaccgtcggcactcattgccgctatcagcaaagcgataccggcacgaatatcgggtgaagtcatatttccggcacgaagctggaaattacggtcatgccctattacaacggcacgatgagggtcacataatataatctgtgctcccatatctatgagcttgtccacaaagaacaggcggctttcaaacattttctgatgaatcagtacactgcctttcgcctgtgtagccaccaccagtaccacactgagcaggtcgggagtcaaccccggccagggagcatctgctatggtcataatagagccatcaataaacgattctatctgataatgttcctgctcggggataaatagatcatccccccgctgttccactctaatacctaaacgacgaaaactttctggaataatgcccaaattttcatgtgatacattcttaatgataagctcacttcctgtcatagctgccattccgataaaactacctacttcaatcatatcaggcaacacccgatgagtacagccatgcagactttccactccttcaatagtcagcaaattagatgcaataccggaaatcttcgcccccatgctgttcaacatacgacaaagttgctgcagataaggttcacaagctgcgttataaatggtcgttttgcccttcgccaggacagaagccatcacaatattagccgtaccggtaaccgaagcttcatccagcaacatataagtaccttccaaatgctttgcgcaaatactgaaaacacttcgttcctcatcataattaaaacaggctcccaacttctgaataccgataaagtgagtgtccaaacgccgacggccaatcttgtcaccgcccggctttgaaatcaaagcctttccaaaacgggcaaccaacggaccaaccaacatgactgatccacgcagactggaacatttctttaagaattcatcactctccaagtagttcaaatccacagtgtcagctttaaatgtatacgaatcaattcctgtttttgataccttgacgcccatatcacgtaacaactgaatcaggttgttcacatccagaatgtccggaatattagtcactgtcacttcttccgaggtcaacagagtggcacaaaggatctgtaacacttcatttttagcaccttgcgggtgtatttcgccgtgcaatttatgtcctccttcaattacaaacgaagccatggtatcattttttaggaattaatatttctttctttgattgttgttttgttgcggtctgcgctgattgttattctgttgtggcctgcgtggaacataaacacgttgctgctcattcaaatgcaagtcttcaggggtcagattaatcactcccttagagtaatcgcgaagatcatccaagattttctgatcctccaccccgtctttgttccagttcaggaagcatttcttcatgtggtttgcaatcaggctgatcagctgctttttctcctcaccttccggatagtccactgcctttttaatcatgttctccaaaatacgtccataatgacggtaacggattccattatgcggataaggcaacatatcgggtttcacctccaggctttctttcttcacaatttcatacggataatcaatatccagcttaaaatcggccataatagccaaatgatcccataatttatgtttgaaatcgggcacatcccgcaaatgcggaaacataccgcccataatgttgataatcgtgttcgcacaacgttggcgctcagctctgtcctcgatggtcaaggcgtgatctaccatgttctgcacacttctgccatattcaggaaggggtaaagttcgttgttgagtattatactccatatatttaaaatttatgatttatgcactaatttgttcatcggctgttacaaaagctttttgggtttggaagctacaaactctttcaaatagaaaggctcaaaataagccacatccttaaagttctgtcttaccatttccttttctgccaatggaaacatccatttacctaacggacggatgtcatcaataaaatgagcattgggatgagtaatctgcccacggcatttggctgcaccgttaccaaaaaaatagaccggatgttcattcagaaactccaaataggaatgctcatcaacaatatcggcagctatttccctttttacgctcaatgcgcggtcataaacagctgcatagacttccatgcgacgtgcatctatcataggacagagcaaggcatcctcaggcaaatcgtgatgtaacaacaccggcacacacaatacctccaatgtcggcagaccgataagtggcaaattacgtccatagcaaatacccttcgccatagagacaccaatacgcaaccctgtgtacgagccgggcccgcaactcacagccactgcatccaacggcataccatgactgtcgacaaacgacaaagcctcatctacaaatacgcccagctgcacggcgtgtgaaggtcctttcaaatcctctttggagaacaccgccaatccatcctcactgacggcaacagagcaggcctctgttgaagtttcaatatgcaaaatacacgacataatgctctacttatataatataatctgcaaatatacacttttatttatacttcatttccataaaaagattacttttgcaaaaaaacatattagttatgatacagtcaatgaccggatacggtaaagcaaccgctatattcggagaaaaaaaaattaacgtagagatcaagtctttaaatagtaaagcaatggacttgtctacacggatcgctcctttataccgtgaaaaagaaatggaaatccgcaatatgatttccaaatcattggaacgcggtaaagttgatttcagcctgtggatagagaaagacgtttcggatacagccactcccattaacgccgcccttgtagaaaactactacaatcagataaaatctatttccgaaatgacccatataccaatgcccgaagattggtttgcaacccttctacgaatgcccgacgtactaaccaaggccgatgtacaagaactttcggaagaagaatgggaggtagtccgccaggtagtggaagaggctatcaaccatttggtagattttcgcaaacaggaaggaaccgctttggaaaagaaattcaacgaaaagattgataacatcgagagtttgttaaagtccatcgagccctacgaaacagaacgtgtagccaagatacgtgaacgcattacagatgctttggaaaagaccatcagtgtggattatgataaaaaccgcttggaacaagaattgatttattacattgaaaaattagatattaacgaagaaaaacaacgactgagcaatcacttgagatatttccgtgaaaccatggcaggcggtcatgggcaagggaaaaaacttggtttcatagcacaggagatgggacgcgaaatcaatacgaccggcagcaaatccaatcatgccgagatgcaaaacatcgtagtgcagatgaaggacgaactggaacaaattaaagaacaggtattaaatgtaatgtaaccggttcatataccggaccccattctcataagcaaagaatcaagatatggcaacaggaaaacttatcattttttcagccccctcaggttcgggcaaatcaaccattatcaactatctgctgacacaaaacctgaacctgtctttctctatttctgccaccagccgccctcctcgcggaaaagaacggcatggtgtggaatatttcttcctatctcctgaggaattcaaacaacgcattgccaatgatgaatttctggaatacgaagaagtatacgaaaaccgtttctacggaaccttgaaagcacaagtggaaaaacaattggaagccggacaaaatgtgatttttgacgtagatgtagtaggcggatgtaatatcaaaaaatattatggcagccgcgcattgtctgttttcattcaaccacccagtgtaaaagaactccgtaaacgcctgaaaggccgtggtactgatgcccccgaagtaattgaaagccgaatcgcaaaagcagaatttgaattggggttcgccgataaattcgacaccgtgatagtaaatgacgatttggagaaagcaaaagcggaagcactgaaagttattaaaaattttattgaaaaataagacgatgatcaaagatccgaaaaaactggcccaaagaatgtcgatactttgtatcctcattggttttatagctttggctgtgggcatcattgcaatggcaatggagcaatacattattgccatagcaatgggtattgtcactgtgggacaagtatggaattacaataaatggaaaagagtaagataaagactggtattttcggcggctcattcaatcctattcacattggtcatctggcacttgctaattatttatgtgaatataatggattggatgaaatatggtttctcgtctctcctcacaatccattaaagcaacaaacggatttatgggatgataatctgcgattggaactggtaaaactggccattgcggattatcccaaattccgagcttccgatttcgagttctaccttcctcgtccttcctatactatacacacattggacgctttacacaaagcctatcccaaccgagaatttactcttatcattggggcggacaactggcttctattcccccgttggtacaaagcaaaggagattttaaagaatcatcatgtaatgatctatccccgtccgaatttcactattgatccaacaactcttcctccttccgtgcaattagcagatactccgttattggaaatcagttctacttttatcagacaggcactagcggaaggacgagatatacgatatttcctgcatccggcagtatatgaacggctaaaaaaataaaaatccccgggaggacacaatccaaatttcccggggaaaaacacatcaattatttaatctaaaattcaaaggacgcactccattaacgctttgccagcagtacttcattatttattaatccgtccaactcccagcctgtcgcatcttttttatatgagtgccacgccaaaaacttcccagcttcatctaacgtatatacatatttctgcgtagggataaacgcttttttattcttgttccacaaagaataatcaatatgcgcttctgtgtctgtgtacgtaacttccatacaataataatttatccaagtcgtgccattccatttcatacttttcttctctataatttgtcccttatcgttgtatctgaactcaaaacgatactccggagtaaggaaagtaccctcttgttcataaacgaccttagccgacacccgaccattttccacctcttcatttgtaatcttcacaggctcgactgcattcagcgttaatacacttgtcattgcaaaaagaactgccatcatggctttagtgatcattgtagttttcataatgtcttatttttaatgtttataattcgtgtttatttgtgtctctatttataagacgcaaatgactctaaaaacgttgcaacatgatccgttttttttcttgagccgcttcactttataaagtgcaaagcacatgccacgaaattaatccactaagtatcaataagtaaacataaaaaagggtgtccgattatggacaccctgtacgttattaacggacaaacagtctattctttctgcttttcaacacgatgcaagactaccagaacaacttcgctgggagtaaataagcggacgtcaacgcgcgaagtacccaatccattggtaataataatcggagtacctttactattctctttccaaccagtcagaaaacggtttccataaatggagtgctttaccggagaatattttttaaacaagctcacctgcccgccatgagtatgccccgctaacaccaaattggcattcgatacatctgtatcttctgcatagtcgggagtatgcgtgagcaatataataaaatcatccgctggaaaatgctgggatggagagtcaccattcctttttaaatcaaacggattgcgtacaccgcttactataatatgctgaccatctttcatcaacttatagcttttatgttccatcaaccgcacatgattcttttgcatggcctccaccacttcggaataacaataaccataatcatgattccccatcacagcaaatgttccgtaaggtgtataaactctgctcaaggcggtgaacaaagtgtctagatttccacctttcttgctacgataatctccacccaacaacagaacatcggcatgcattgattttaatgctcgtaccgcactgttcaattcactcctcttaaaacgactctcataatgaaaatccgaagcaaatcctatccgaaaaccatcaaaagcgggtggaatatcataactataaaaatcatattgcttcacacgtcctactcccggaaactcggacaaagtagctgtggcgcaagaagacaaaaaaataaccgctaaaagtaaaaaaagaaactgtttcttcataatcctttctatttggagacaaagatacagaattaattgttttatctttgcacaaccttaattataaatagaaatggaaattgttcaagttaactcaataaaagcatggcttctagccgcccgtcctaaaacattggcaggagccgccactccggttttactgggatgtgccttggcctatgcagacagctgcttccaaatgacaccagcattgctttgctttctcttcgcttttctgatgcagatagatgccaacttcattaatgattactttgattatctgaaaggcagtgaccgtgaagaccgcttgggtcctgaacgtgcctgcgcacaaggatggatcacactgaacgccatgaggaaaggaatcgccctgaccacagcgacagcttgtttagcagggttatgcctattagcttatggagggattgaaatgattccagtgggaattttatgtattttattcgcttttctttatacagcaggaccttatccgctagcttatcacggatggggagacatacttgtcattgtctttttcgggtttgtaccggtaggctgcacttactatgtgatgtgtcgtagctggacttggaatgtaacactcgcctctctagcttgcggactgattatagataccttgttgatggtgaataattaccgtgaccgcgatcaagatgcaaaaagcggaaagaaaacaatcgtagtacgctggggagccaatgcagggcaacaattatacctatttttgggattggctgccgcatggctttgtttattgtttattccgaccggacacatttgggctgcattattaccccaactttatctgttacctcacttcatggcatggcaaagaatggtaaaaatcaaaaagggaaaagaattaaacagcatattgggagaaacctcccgtaatatgctactattcggagtattactagcattcggccttattctataatcttctggcaaaatcttgccagaagatatctcccgaataaagcacaacaaatcattccgctttctctattaatacagtggcgtaagcagaaataccttcctccctgcccgtgaatcccagcttctctgtagtggtagcctttacggaaacatcatccacatcaatcctcatcaaatgagcaagcaccaactgcatttccggaatccgcgctttcaatttaggacgttcagcgcaaatcgttgcgtccacgttacctactttatacccttttgcagcaatcaggtccaccgtttcagccaataaaatcttgctatcaatattcttgaattcgcctgcagtatcaggaaaatgataacctatatcacgcatattggccgctcccagcaaagcgtcacaaatagcatgaatcaacacatcggcatccgagtgtcccaatagccccaattcatgttcaaattttattcctccaagccataattcacgaccgcttaccagttggtgcacatcaaatccaaatcctactcttattttcatcttacataaaaatctaataatttttcaccttccaaatacccctgcaaatgctgtcctatactgactggccctactcccacgggagtccctgtataaagcaaatccccaatctttaatgtaaaaaaccggctaacgtatgcgattatctcatccaccttaaacaacatatctgcagtattacctctctgcaccgtttttccatctatatccaaatgaaagttcaaattctgtatatccttaaatctgtctaccggcacaaaatcacctatggcagccgagctatcaaaccctttacacagctcccaaggcttaccttcctcccgaaactgccgctgaaggtcacgtgccgtaaaatctattcctaccgtcaccgcatcataataccgactggcaaaacgcggagcaatattctttcccaaacgattaatacgtactaccaattctgtctcataatccacctgctgagaaaaatcaggaataaaaaacggcttgctgtctttcagcagagccgaatccggtttcataaaaataaccggttcttccggcaaattctcatcagcatgcaactcgtggcaatgtgcaacgtagttcattcctacggctataatcttcatgttattattcttgaattacatttaatctgttaaacattacagccagatgggcataaagtgatgtattctgcaccacaatattttccggtacacgaatacggaacggtgtaaagttccaaactgccttaatgccacccgctatcatcttatctgttatctcctgtgctatattaataggcacagtcaacaccccgatattgacatcacaggatttcatttttacctcaaattcatccgaatgataaataggaattccatttatttcctttcccaccagttcggggttaatatcaaacgcacctactatctctaatccaaaatgatgcaggcccgagtcgcgcaacaaagcacctcccaaactaccaacaccaaacaaaaaagctttatgcatcttggtaaatcccaagaaacgctccagcacctctatcaacgcatcaatctcatatcccacacgtgtacggccggatatatttacataagaaagatctttcgctatttgggaagcatccacattgatttgcttggatatttgggtagaagacacgtacgtttctccctgttctttcatcagtttcacattcgaaagataccacggaagtctgcgcaaagtcggctcaggcactttatccgagaatttatgcatacgtatatccatctttttctttaggtattatcattaggtaatttgcaaaagtacacttttatttgttacattgacggatagagtataaaaaaagtcttatctttgagtattcatttaagcaaaattcacatgaaaaataacgattggaaagaacgtctgaatgtggtttattccacaaatcctgatttcaagtatgaaaacgttgaaaaggaagagactaaaacattagataaaaaacaacaaaagctccgtgtcaatatagaaaaaaaaggacggagtggcaaaaccgtgacattaatcaacgggttcatcggaacagaaaatgacctgaaagagttgggtagattattgaaaagcaaatgtggggtaggcggttcagcaaaagacggggagatccttattcaaggagagttcaagcaacgggtcatcgagttgttgaaagctgaaggatatacccagaccaaatagccggaaaaaagaaagggactgttgtcacacagtcccccttctataattgcggaaatcttattcagcacgtaaagtgaaacgtttgaaagcaacgatctgcaattcaggatcagcttccttcaacacttctcttacagtcttcttaccatccatgatatcctcttggttcagcaagcaaacttccttcaagaacttgcccagacgacctttagcaatgttttcaatcatctgttgtggcaagttagcagctttttcagcagaaacagtagcaatgatttctttagctttggcaatatcttcgtcagtgatccagcccttagccttgttactttccatatgttcttcgctgtctacgtgtgcagggttgataccagccttcttcaaggcaacttcaacagccttgtctacttgttctttcttagtcttgtcaatagctacctgtatttcagcttcttttacagattcaggaacaccggcttcatcaattgcaataggattcatagcagcaatctgcatagcaactccgtgagcggcagcttcagcttctttattcattgcaacaatagtacaaagctggttatttccctggtggttataaatagaagtataagcaccttcaaccacattgtaaccatccaattccattttttcaccagtgataccactacggtctgttactgcatcttgtacagtaccgttacccataggcaaagcctttacttcttccaaagtcttacacctgttggcaacagcagcatccagaatagcttgagtcaaagctatgaaatcagcgtttttagcaacgaagtcggtttcgcatttcaaagcgatgatagcagcaaattcgccatccttttttgccagcacacaaccttcagatgcttcacggtcagaacgttttgcagcaacagcctgtccttttttacgaataatttccatcgctttatcgatatcgccgtttgcttcagtcaaggcgttcttgcaatccatcataccagctccactaatcttacgaagcttggttatttcagccatagttacagccataatattcctttattttttaattgttagtaatatctttaaaacagaattgagaattgaaaattgagaattgagaattaacagcataatctgcccctttcccaattttcaattctcaactctcaatttatactattaagcttcttcgtcttctttcaagaaagcggcagccttagcagcattgatagcttcttcttcggctttatccatacgagccttggtatttttcttcttaccagcacccttaggagcattttcaccggcagcttccatatctactttttcagcttttctttcttccaaaccttcagcgatagcgccacaacaagcatccaagatcacttctacagacttagtagcatcatcgtttgcaggaatcacgaagtctacgtttgaaggatctgaatttgtatcaacgatagcaaatacagggatacccaagcggttagcttcacgaactgcaatgttttctttcaacacatcgacaacgaacagtgctgacggcaaacgagtcaaatcagcaatagaacctaagttcttttccaatttagcacgctgacgagaaatttgcaggacttctctcttagaaaggtttgaataagtaccatcgttggtcaacttatcgatagtagccattttcttcacagccttacggatagtcgggaagttagtcaacataccacccggccaacgctctattacataaggcatatttacagaagcagctttctcagctactacttgtttagcttgtttcttagtagcaacaaacaggactttcttacctgattttgcgatttgtttcagtgcatcagcagcttcatctactttagcaactgttttatggaggtcaatgatatggataccattgcgttccatgaaaatataaggagccattgagggattccactttctcttaaggtgtccgaagtggcaaccggcttccaataatgtatcgaaattagttctagacattttattattctttaaatcgtttactttcttttttgtttatctcaaccaaccatcgggtagtccgctaccaagtagagtcccgctggtttagatactaaacgcttcttaaccagttccaagtaaaaccggatattaacgtttactgaactggaatctacgacgtgctttgggctgacccggtttcttacgttctacagaacgagagtcacgtgtcatgaagccttctgaacgaagagccgttttatcttcagggttgattttaaccagcgcacgagcgatagccagacgcaaagcctgtgactgtcctgtaaaaccaccaccgtaaagatttactttgatatcatatttttcagcagcctctagcttgttcaaaggctgttttactacatactgaagaatagttgatggaaagtactgtgcaaggtctctcttgttaatagtaatctttcctgtaccttcgcttacgaacacgcgtgcgacggcgcgtttacgtctgcctaatgcatttactacttccattctttattatttaagtgagtttatatcaattgatttcggagtctgagcctcatgtttgtgttcactaccagcgtaaacatacaaattgcccagcaactgtgctcccagacgatttttaggaagcataccctttactactctcttcaacagtttttcttcaccgttaggtttcttcatcaactgagcaggagtcatttctctctgaccaccgggat

SEQ ID NO: 14419 - DNA, 3056 bp, Unknown
  gut microbiota DNA sequence
atagcaagtaaagatattcctatttatatagtaggtcatagtttagggggatggaattctgctcatttatgtaaacatcttgttaataatgggtataacattaggatgcttgttacattagatcctgtgggagaaggggtaattgtatatgtaggttctgatatttataaagaaccggaagcaaatccaggtgctaaaatttggattaatatctcatgtaatccaatttatgaagaccaatcagataaagttgctgattttggagaacgttggtttcccaagaacggaccaacgatatattatgaaagtaaatgttctcatgcagaagtccttaggatgtttatggagaatatattacaagataagtcagcattagatttattaatagaggacattgttaaataaatgatatgggcattttatatcttatatttagccttttgattgttagtattacttctatttgtattattgggtatgtagtcaaaacaagaaaatatcatttcttatggattattgttgctttgatagttttattgtattcagcaaatggactttacaactattatcgaacatgtcaaataccaagtattaccctactttcatttaggcaagttaatgccgatgagattcatagcataataccatataacaaaaattatccagtatatgtattagaatttaattcagacaaaaaattggaagatttttctcgtgctccaaaaatagcttttttatctccttttatagaaagaaaagactatcagtctattttagaaataggaaaagattctgtttttgagagtatttatatatatccaagtaaaaaaactaatagatatgattatattgctttattccaaaatgataatgaatccatagagaggctacaacattataatacactttattttaggctattttttcttggttatttagcccctatttatggtacactatctgttcctgttccaatgtttgatacacacagccgagattcagaccaattgtttttagacaaatatataatccaataattgcttaatgccgagtgaattgtatatatttaataacaataaatagtattatatacactaataatattgtagaggatttgtatgatgattaattgggtaaactttttggaatatggaggtgattagaaagattagcaatcaaaatgtatagaaaacacttaaaattatttgatatttgcgaatattttatcagattcgtttaaaataatacaccataattttaattatatccatctatgagccaatacaataatatttttataagcagagaagattttctggattataaaacaaaaggaattccgtataccggatttgtaataggagaagggtatgcttatgtgcaatatcaggattattacgaggatacagatggaacagtcatagatatgaatgacaatatattgccataccaaatatgcatacctaacattgttcaaatccaatgcattgatacctcaaaggaaatgataaaaaaaagcctcagagggctatttagcaaaaatggatgcgcaagatatgtagtgtgtgaaggagataccttagtatatattgcagaaatgtttgatgttaccgttgaagaattaaaaagatggaatgacctgtcaagtgagtattctatatccacaggacaaaggttattaataattgacataacggaaagaaggattatagatataccaagacaggtttaccatggtgaaataaaagaattgaggggattggcagcttttgaaatggatataaactctccttcttcaaacattctaggagaagggctaaggttattcacaaaattcttttatgatggggttaatgcccctgtaatttggattacaggacatacacttggcggtttttctcaaacaccacaagaaagggcacaagcattcatggactttgcgcccacagcattcattggaggaacactaagaattttaggaccttgcagtaaaataaatagtggtcttaatggttataatgcttatgtcaaatcttcaatgtataaacaaaatctttataagccaaaaggacaaggatggcaaaaagaggctggaaaaatgtttcaacaggctaaacaacgtttcaaaatgagtgaagaaggtgtatcatttattgacatgatagaaactttcaacttttggaatgacacctcggaagaacattttaattggtataaaacttcaacagatacattaaacaacaaaaacaataagtaataatgagtgcacctggtatatattatcacgttgggaaattcttagtttggatttggcataatcatacacagaaaaaaaagataaaatatgaagatattatatttcaatatccaataaaactattctggatagttggcattattgcaggaatattatttatcataataggatatgcgttattcagactgacaaaagatctctaagagcaacggaaaactataaatggcagtttatttctaaaacgaaccatagaatgaatattcaaaagacaataataatgattgatattgtaggactggaaagtataggcaaatatattatttggctatggagtaaatatgtaaaacgaaaacatataccttatatggaccttgagtttcattatcccaactatctctttatagtactgggaagtattgtatgtgccattatattgggcatagcaattgcctatttttcaattaaataaggaaaagaccccaattgccatattagatgcagattcccaaagcgagcagaatcaagaaccgggaagtggctaaaacggaaacgccacaggtatgatgtgatatacatcaccttgtgacgtttctgttttaagatgtatttgtctgctgttcttacttttgcagcaagtattcccctattgaatgataccggtctttgattgtggcattttcattgaatccattcagacaatggagcaaggctttctccaaagtggtgtatctgcggttaaaacattgcggattgtccaggcaataggcattcaaggcatatctgtatggggcatattcag

SEQ ID NO: 14420 - DNA, 25288 bp, Unknown
  gut microbiota DNA sequence
ttatataataatttatcatgttccggtcaaaagatatgccaacaacaataaccgcccgtcaaatcactgtatattaactaaataagcaaacagaacatctgtaaaactgtagaataaatccacatgaatgtagaatttgtccacacaaaaaaagggtgtgataccacaccctctcatttaataattatttaaaattaatttttagtatatcccggattctgctccatatcaggactaaatgtaaactggtctgttggaatcggtaaaacacatttataataatcccagtctatttcctccacgatacccggtaaatgatatcctcccttacgaacaatggtctttccatttctcaacatatcaaagaaacgatgcccctcacctatcaattctttacttctttcttccaacaccctatccaatgtatattcagccgccgttacttcttttacaggattagcacgctgcacaattgcattcagataattcaaaccttttacggcagatgccccacctattttcactccggcttccgccgcattcaaatagacttcagacaaacggaaaataacataattattttcaaaagatggagtcgtagcatctgttcccggccattttttcaaccaccatacatcatttttattataaacattcttttccagcaacagacagcgaatatcatccggatcactcaataactcatccacaaatttctgagtagcaaaaatctcacgatacccattccaatgcattagatatgccaatgaacttcgtcctccattatcatctgtactattagcaatttcaaataatgattccgtaccaaacgtatttttcagatcccatgccggaatatattcatcacgtgtataaagacggtacattccatttccttccacttcttcaatcaagttgcttgccatttgaaacgccttctcgttatcatcatgatacagataaatacgagacaacaatgctcttgcagcatacgcattcatccggctgttatttttagaagtactcattaaaggtatagcctcctccaatgtattgattatgaactcataatcctttgctacagtgctgcgtggcggattttcatctaatgtaattgcatgatctacaattggagctccccaaccggcccctttatccttagtataaggataaccgaaacaacgggtcaagtcaaactggcaaagtgccatgatagtcatcgcctcaccttttaattcctttaatctttgctctgaaccttgcacttttccatcatcaatcgcattgatcacattccatgcattacggataatataaaaaggacgtccccataaatatccggcatttaagcttgtagagcgatgatcatataaataacaccggttacaagttctcccgctattataagaactctgcatatcatcccctttcatatccccataaaaaaacatggttccgccataatagccatagctggacatcaaatcatacaatccattcacagcattatctatatcctgctctgtactcagtgccaaatccgtagaaacgctatcaccaggatgagtggttaaaaaatcatccccgcacgatacggccaataaagaaatcaagcctaatataattatattttttttcataaacagttcggtgttaattgattagaatttaagttcaagtccaaatgcgaatgttttaagaggaggagtaaaataacttacaattccattcaactccggatcatattgatcgtatgcagcccatgtcaacaagttggtacccgaaaaataaatacgggcagaattaatacctatggttcttaaccaagactgaggagcagaaacgccaacaatcaaacttttcaagcgcaaatgatctgtactatgaataccacgtgatgagttccaccagccaccatactcttgtccatacacatatcggggaacatctgttatatctcccggctgtttccaacggcggcgtaactctgtactcttattgtattgtgccgtatagccgtcatcttgcaaagcatacatggcaccatcgtaagaatatccacctaaatgaaacgacaaattaaaagataaatcaataaacttataattaaacgtattcatcaatccaccggttaatttaggatatatatctttcaactccacacggtcggcatcattgggatcatacacaatattcctgcttctattgccattttcgtcttctttattgtcataatacatcgggcgtccgtcattaggatccactccggcatattctctcaaataaattgtcgcatacgaacagccttcctttctgatataatttccatctataaattccggaagatccgccagttttacaatcttatttttattatgtgacaagtttaaagaagttgtccaactaaaatctttggtttgaatattacttgagcgtacttctatttcaaaaccggtatttttcatttcacccacattcgtaagaatactgccaaaaccactaatagaattcaattgcttactcatcaataaatccttagtcgttctggtataccaatcgaaagtcaaattaacccgtctgaacagacttaaatcaacccccagattcaatgcatagttcttttcccaagtcaaatcaggattagcaatagcatcttcccacggagcaggtttcccattataaaatgctccggtagtataagttccatgataaccataataaccggtcggcagattaccgttcacaccatacgatgctcttaatttcatatccgacacaacattctcccacggtttcatgaagttttcctgagagagtctccatgaagcggaaacagcccaaaagtttccccaacgggtatcaggtgccaatcgggaagagccatcacgacggaaactgaaacctgcataatatttatcattatatccataattcaagcttcccacatacgacaccatagcatcttcctgccttgtattagtaagatcagcaggtttggcaccattatccaacgacggattaagtgtttgcccgtaaacctgtttctcaccatacatatcctcataatcgtacttcataacctcatacgctaagaccgcattaatgttatgtttaccaaacgttttattatatgccagattcgtttgtgaagtataactcattctctcaatcatcatcatctgtccggatccctgtgtagcttccccatctttaccgtcaggcgagtaaaagaaaaagtctttatttaaagaatagtctactgtaaagatagtagataacttcaacccatccaagatatgataggcagccttggcagatgccattgtacgtgccagacgtgcataatttgaatctacagaattctcatacagcgggttaatgcctccattattctggaaacccgtatgatagctgccatcctcattataaataggtatagaaggggtcaattgatattttgaagaataaagcgcactggcataatactgtccctccggcgtatgtttattacgagtccatgaaaaggtagcattcattccatactcaaatttattccatttactgtttgcatcaatacgaccggtaaaacgttccattcctgaatttatgcttatacctgtctgattggtatatcctaacgtaccaataaaattcgacttttcattacctccgcttacagacaaactatagtcttgctgatgtccttttttcaataaagcattttcccaatcagcatatccgttgaccgggcgtgccgcataattgtcaatttgtccatccgcataagcctttgcctcggcttccgagtccccctgattcaaacgataattaacaaatccctcataaatcaattccctacgctcttcaccacccattatcggacgataattgtaagcaatatccgtaataccgtaagtagcctgcatactcactctcattttaccttccttaccttttttagtagtaataaggattacaccgttagatccttttgctccatataatgaagcagaagcggcatctttcaatacggttatactttcaatatccgcaggatttaatgtctcgatcaaaccaagtcctcccgcgctggcattggcacttagaccactcatatccctagacgctaccggcacaccgtccaatacataaagaggttctgtagaagcattcatagaagcaattccacgcacccgcactgtagctttagaacccggctgggaagaactggctactgaacttaaccccggaatattagcctccatcatctgtgctacagacacaacaggcaatgactccaatttatccgtattcaaaacagaagcagaccccgtataagtagccttcttaaaatcaccataaccagtcactaccacttcatccatcaactgagaatcctccttcagcatcactcttatttgcccgttagcaggcactttcacctccgccgatttcataccgatgtaactgattacgataatatcaccctgtttagcatcaagagcgaaattaccttcaatatcggtaatcataccggtattggttcccttgataattacggacgccccgattaaaggcattccgttagcatcctgcacattacctgaaacatgttttttctgctgtacgctttccacacgatctgaaaccggagaagatagtgcatggttttccactgcgagcacggagctcaatcctgtaatagacattgccgaataggcaactacaaacaaacatctgcatttgtctgtaattcgagtgtgtgtgtctttattcctcataaaattgagtatatttataaataccatatatgagttcagcttattcatacatattccaatcgtcattctgtcaccgaataagcctaatctttctccgtattatattaaggttgtgacaaatatataaattaaaatctataaaagaaacaaaatgaatatttttttctcctcatatcgataaataaaaatacaacattcatccaaataaaaaatgtgccaaaagtatttactacctttggcacatacccacccggctgtttgatatatcaataaactgccgaagcgatcacttgtataaacaaaataaggaacaccattgcaatcggatacaccgtagcgtatgcaacactcggaatattactatctaccatggaatcggctgccgcaagaccgggcgtactggtcataccaccagtgatggtgcccagcaaatccaacaaactgattttaaagaccaacctgccaaccacaacagcaaccagcataggcacaacagtaatggccgcccccactccgaacaataacaatccgctctcctgaaaagtagccaccagattcttaccggcagaagtaccgacctcagccaaaaacagcaataagcccaactgacgtaacaactgattggcaggaccggacatagaccacaatatgggtcctgtctttcccacggcactcagcaacaatgccaccatcaatactcctccggtcaatccgggtgaaaatgaaacgctgtctgaaaatgaaatatttattttaccgaacaatacacctaatacaatccccatagctatcgggaagaaatcagtatcagacaactgtttggcattattccccaacaaacgagcaacgcctctgagtccttcccgttcaccgaccaccatcaacttatcaccgaatttcaaggccaaatccggagaaggtgacaagtctatgccgcttcgacggatacgggttaccgtacaaccaaagttacgttgtaaattcagatctcccaattgcttgtttatcatatctttctttgtcagcaataaagattcaatctcctgtgtctggtccagaggcaattcgccttcctctcgttctccaaccaatacggcaaactgattcagcgcttcctcacttcccaccgcctgcacatagtccccttccagcaacatggtattcgctttaggcatcaatatagaatcctcatgctttacccgcgaaataacggctcccgtcatggcacgcgcatttatttgcgccaaagtacgtccgaataccgcttgattggtcactctgaaaatgcaagttgtcagttccggaaaaccgctgcgccgttccagttccaacctgcgcgcttctttatccagatccacccgcataatcttgggtaacagcttcacaaacaaaatcacccctatcactccaaacgggtaagcaataccgtatgcaatggaagccaacggtgaatttgtactgtctatagctaccgccagaccaggcgtactggtcaatgcccctgctatcaatcccaccacactgggcgtatcaatgtcgaaagcatacttcagtcctaccgccgtcagacaggcagagcaaataataagcatagtaataagaatcagtgtctttcctttactcctgaaagaatcaaaaaatccgggaccggcctgaataccgatggtaaagataaagagcaccaaaccgaagttccccaattctttaggaatgatcacaccgaaatgtccgaaaagcaaggcaatgaagataacggccgacacatccagcgacaagccctttatcttaatcctccctagcataaaacccaacgctacaataagaaagagcgagaaataagaagaatgcagtaaatcaattaacatatttttaagaggttagtttcagagcacaaagatagtaaaaaatgccaaatgctgaaaccttccccttatgattccattttatattttcagatcgcccatttaatgatacatatagatttcagatctcctctttcggtggtctgataaaacattcatttaatatcagaacttcattatatcccaatactttaaccttataagtatataaacattccaacaaatcatcttgggtattctgaaaagcagtaaacggtgccctatgggaatgttcaggtatagatatatttaagtaaatccgatgtgatttataatctacaatattcaattccaccaatttgttcaatgtttcatacaattgtttaaaagcatctcctgcattcctctctatgttcttttccaaacaatatttaagttcaaccaagcaaacccatcccttactgcttgccctactggaaacaaacatacattcacactgatcagaacctttcaacacagccggattctcctcaaaattcactgcccaataagtcgtttttcttggattaatcaaatgaaaagaagctatatcatcaggatcttcttcctttatacatactttccgtttaccggctgtcgcttgtgtataatccatgacataggcgtcacctgtcatctcattatatcttgtaaaagcttcaatcctcatcacaataatccattaaggcagcaaagtctgtcatgatattcttcattatccgatcaaaatagttattgcgaatcaatcctctttcatcttgaatagtatagttcggattctctttataaggaaaaaattttccatttttaatctcccatacagaaacatcctccggcttgacaaacgaatccttcatcttttgtaatccctcctcttcttccggtatattttcttgtaccaaagcccccagcatgcaattattcagtgcataaagcagataagggctgtgggtagtcatcagtaaatgatcccgtccgctattgatcatctccaacagatcatagataagatctttttgagtttcgggaaacaaattcaactccggctcttccactataatgttggagtaatgaggatgagaaatattctcttcaagttccaaaacggtttccaacaaattatccaaagaatcattacccgcttttttcaagatctttgctgttcctaatatctttttgaaccctggagaaagctttgcttcttttactgcctgattcaagaattcctcatccataacaacattcatttgtttggaaaacattttaatatactccctggacaatgccccttctattctgtctttcttttcaaaagaaatatcttcctgatgatcatatatccaatgggttaaataatatacataaacatacaacggcacaaccgactgcaacccgctggaagcctcctccaatcctatttcttttccatcttccagcacaatcatatccttttgggatgattcgtcataataatacttcaatttcagtttcagcaaatcgacagcatttttcttttggaacttttgatgaacttccaaccagtcaaaaataaagcttcttgtattatattcaggcatcttcaatgacgcaatattgggtaacgtaacagcatttctttcagcgggtatataagcgactttgccaattttgcacctttcaaacccgtcttttaatttagcgaagcacatatcttttgtataacaaaaatcaatagcatcacccacaaagaatatagcatatccttcattcagatagtttttcaatttatgaaactctagcaactgtttttccacaaagctccaacttacataatcagtgttacgacgcatcagcacatccttttccaaccatagacagaaactgataaccttagctattgtacttttcccactgctttgcggaccaatcagcatgttcactttattcaaagtaaaatcaacatgctctatcggacctatcttatctattataaattttggcataaactctgttctgacgaattcaaactttttaagagaacaaagataaactatttattcctaccggcaaataaaaaaatactttattgcacatccagcgcatccaatgccagtccctccatatccggtgcggaaagcaccaccttataatagcctgcattgatatacgtacccgtcgttgtactcagcatacgccactttccgggagtttcggcaaaagtcagattatcttccttcagtaccacccctttggaatcaatgaactgcatacgcaccttcataggcttccctgtaacattcatgtatttaaaacgaagagcatagacttgtgccagaccggtagaaatgttccaagtaatactgctttgtgtacctttaccaaagaaaaccccggtttgtttcttaacctctttctttatgaacttacctttcagcacagcatcctccgcttgataagtcacattggcacgggcgtttttatcttcaggcagtaattctttgggagtcttttccatcacctccttgtcttgtgcagcccagctgaagctatggacagaaaaagagcgaacggaatccaagtcgcctttacaagctatcgcaatgccacaaatcaaagcttgccccgctttcacctccggaaaattaatcttcaagactccccctttcacgatagcattcaccacctttttgcaagcgccgtcatgacccgcttcagcccatacatccaagtcgtccagaagtactttatcatttaccgctacatcaaaaatacgcaagccttcacaatccgtctgtacgccgcctcctgtaccatgccagggttctgtaaaataaagttccacacgatactcgccatccggaacgggaaagcggaagttcagcttatggcgtccgaagcggaaagtctggaacagttcccagtccctagtgccatgaatgggatcattcgtggtacgctggctcgcctgataagggctcaacaactgtacactatccgacggatgaacaaacgattccgcccacgaatgagaataacggctgttatcctgcgcccagacctgaccatacgtatccgtataagcgtctcctccgcaattcaaacgataaagatacgtatatccctcagctcctttcaacaaatcagttccgttcaaccggtcggcagcaacaggcactatagcagaaccacggtaaagagcttcaaaatgaggagctttttccagaccgttcagcaccagcacatcttccgctgccggttttcctttaaagtaccccacagcacgaagcacattgtaacggatatcgcggttttcccacatgaaatgagtccccaccccatgattcaatttccgtcccaagtattcagcatccaccgcatcattgtacagcaacacactgtcacaattgctgtacgcctcaatggtagcccgtctgcggcctgtcgcaaaacggtcctcccatgtatgagatgccagataaaccatcggatcttcggaagccggcacatagttcgcgcgatacatataatatacatccagcggctcctcccacggagtcaccaatcctttataattaaatggtcccaccttatctatccggcgatacgcttcatccggctggcggcgtcccggattatcatgactgctgaatatccattggaattgtccgcacacactgtcctttgcctgttccgccagtcgtatcttggtttccatcagctggcacatacgctcctcgctccatacaccattcacatcaaaagctgccggttccgtatgcaatccgatgctgcgccatgccccatattcaccgttcaacaactgattcttctgtgacaattcacggccatacttattcacatcaccaccataggttccactccagttctgaataacattccaatctgtcccatcaccaccgttacacgtagtaatcacacgcatggtacgggccgtaggatccatttcccggataatctcactacactcctcggcaaactccttaggcagcgtgctttcgttctgcaatccccacatcaccacactgggcgagttacgacgctctttcacccactggcggagcagtttcttgaaattctcacgaaactccggagtatcataccacacgtgggccgaaaactgagtccaccacaagcccccttccttgtcccaatatttctgataatccaggtgatggggctggtgagcgtcacggaaagcgttgaaacccgccgcacggatctgtttcacacgggctgccacctgctcacggctgaaagcatggctttgtccgaactgatgttcatattcacacactccattgataaagacaggctgtccgttcagatagaaccgtccgtcaccatcctcccgtttcaccggccaactgatggtacggataccaaagggtgtactaatctcatccgtagtactcttaccacgctttatcatactagccagtttatacaaataaggattctccgtactccataaaacaggattctgcactagcgattgttgcttcaccaccttcctttcacccggctgcaaagtcaccttctccgtcaggcggaacacctgcttgccatccgcattactgaatttattaaccacttccaccgtctcagcagtctttccgtaatttttcacctccgtttccacaaagacagttcccgccttatcatcattccagatatgcactccgaaaggctcaatgcggatctcatccgtagcctccagcaccacgggacggaaaattcccaaaggctgggaaccttcgctgaatccccattccgaggaacagccaccgcacacccaaggcatgtcggctatcatttcaggatgttccgctttcactaccagcttattctctcccagcttcaacgcatccgtcacatccaatgtcagcgtagtacgccctacgggatgacggccgaaatcctttccattcaacgttatagtggcatacgtccccactccctcaaaacgaagaaaataacgttttccgaatgaagagttggaaattagaaactgagaatcatccaatgtgaaggtcttttcgtatatggcagtaccgtgcaaattaccatgtgtcagttggcggtagccataataatcatcccagttatgaggaatatttacttctattgccttttgagcaaacaaccctttcagatgagttgcttccgtcagccatgttttccatcctttatccaattccatcaccatccggcgattcttcacctcccgttccgggaaatgcacttgtgaacgtcccatcggtttgctggtagcaatggctataccacgttgttccgcgtcattcacggcacaatagaaatgatacaccaccccattgtatttcaccacataactcttatgagcgaacaattcatcatagtctttagaagggataatcaaatccgcccctttccaatccgtccaatgtactaggtcataactggcagcaaatgtattaaatgccttgtatttgcggctcggttcaaaagccgagaaatagaacatgacatacacatcgcccattttctggatatgcgcatcccccgtaatggttccgtccgcttcgtgtgcaaagaccggattgcccggatatcgtttccatttcttcatatctttggacaaggcgatacccacccgttccgctttcaaatccgtttccggatgccgtcctgccgcgttatagaacatgacgaaaggtgcgcccaatgttttctccttatcccaatagaccacactcttatattgagtcagcttttcccaccattgcgcgtctttatcatggatactcatcacgggctggtcctgtgcctgccattcatgggcggaacccaaaggccggtctgtccaggccaaaccaatatacagcggcttgttcaccgattcatatccggtcccttccccacccagataagtcatccaatgcttgcctttatacgtctgcagggcatagcttcctccccactccatatccggcaatgcagggaaaccaccacgctggttgcaatcccagaatccgtcacgataagacaagacacgtcccaatgtacgccattccaacagattatcactttcggctatccatgtctcgtatccacgtccgtccagtccgctcttaccattataaaccacgtaggtcatataccacttatccccttcgcggaacacggtagggcagtctattttatgcttgttgtcggccggagctacagccagcccatatttataaggagtcttggcttcctcataaatctgctccatgcgcgattgcggaacttcacgttgggcgtatgttcccaatgacaacagtgaaaatgccagtatcaatatcttcttcataattatctttttatctattggcaagacggacaaaagaagaaaatgtacccattcagagaacttttatctcattctctatttttaccatcacatagcaggggtcagctcaacattcaatcccaaagcagaagcaatacgataaaaagtagaaaccttaggctctgtttttcctgtttccacacgggaaatataagacttattagtccctatcttttcggcaagttccgcctgtgtcatatttgctttcttccttgcctcttcaattatttgcccggtaaagaaagcattcattgaacaatataacaatatgcccttcatcataacagaagaaaatcctatagatattaccttgccactctattcttaactcatacagaccctctttaagaaacttcacatactttgccggtagtccatcttgagtctttaataagagtaatccatataggactttttcttgcgtacctttatccagagcatcaaaaaaatctttaatagtagttttcgtatgctattatctttctgctcatacgacaaaaataaaaaaaagtttatcagttaagcaacttttccttataaaaatcttagaactatgtacaaaaatagcgtaaaattctcaagatatacttgaaaattttacgctatactacggattccagcctctggaactacggctactaatagaacatccagtccatcgtttcctccgcaccggccagtcccgcattacgtggagttacctgtgcgtctgtaaatcccaacaccatcgtatatcctttcggcagcaacaaggtatgctttccagcctcaaaatgataagcatgtacatttgccagcggcatacccgctatgcgtacggcattggtcagtttcggttccgcctgaccgtaatcattggcagaagcgtccgtttccagtttcggagctttcgcatacttcttctggtcatcacggaaataacctaccaacaagttcaccggagcagccgcttcaaactctattgtcgtaccttccttgcgctgcacatccccgttcattctataagcagtcagcccttccagctcggcggccaacgcatctaccttgcccggcacattggaaaacaggcttgcacccgtcgccagtttcaccggagtcagtccgttcagaatcttcacatttgcggcggacaaaggttttatctcagctgcactttccgtcaccttacctgccgccttatctttcagcaactgcaagttcgccttgaaattagccagttcattttcataatgcaccagcatctctttccaggtcttgttcttgccaccgtcaccaccgataggaatacggcgttgcgcggtctgcatactgttggcataataataagtactatccgtcaatgccaccagcttgcggtaatgatccagactttgttccatcaatggaatagcagcgtccaattcgttcagatcctttccccactgatagtttaagacacgctgcgcagctttcactttcaggttaaacgcgtatgcaaactcacgatagcaatgcatgtcattctgcaaacgtccgaactcctctttattacgagtcaccgctgcggcagccttatcaatggccgccaccgccttgtcaccgtgttccaccacctgcgccacaatatccaacggcaattcgcccacatgtggctgttttttccattctttctccacatattctatcagcttctcgccctccggcccgcaactctcataaaatcccggatagatagtatatttataaggattcaccaactgactcataaacatacccagcaacaaagtctgccggttcccttccgtgatgccgaaacggcggagcaacttcggagcaatctctccactctgctcatatgcctccagaatatctccagcttcggcagaagtcgtaccataataatcacccaactgcttgtcccaatattccacttcagatgaacggtcccgatgacagttccatgcatagcgtccccaggttttgtaccatatccagtcacggtccagctgatactcccgtttgccatccggcaacttatcagccgtgtacggccagtcccaataagaagcctgcggatacagatgcagggcatttgctccatgtacattgtgcatggcattcaccgctttctgtacaaagtcgggagatccccaacgccacggttccaagtttgccagaatatgcacattactgatatgaatacttcccaaagcactcagatccgaatgtatcttggaccaaggacctcgcggttcgtaagtagtcagtgactcaccattgtatttatgcatggtatagaggttcttgtataacggcagcgcggcatccatcaccatcttgcagtccgtatcgtgcgcacgcagcaagatgggcggctcatccgtacgccccagtgccttcaacccgtccttcactcccggaataatggttttggtaaaccactccacatcatcctcgtaggtatccatcgcttcccccaagcataccagcaaacccacattgggatatttttctataaacgcggccaccgacttacgtgtataatcactgatcagcggagtaataggacggttacgatcctgtgttttcaacccgtaatgctcggcaaaaggcttgcttaacaatatattataaaacatctggatcacaaagatacctctcttgtccgcttcggcagtcagaaacgagaacatttcctcatttttcttgaaagtttcctcatccacttctacggcaaaaggatactcttccagcttcaccaaggaagcaaacggatgcccgttccacagatacaaggaattcatacggttttccaccagcatatccagatattttatccattgttccttatcataaaaccaagggaagctctccggcgtatagggatactcatacacccctcttccgggcaggtattccattttctgaatccctacacaacctccgcgaagcaccatttcgggagcatccgtcagttgtgccggaaacttcaaatccttgtattgtcctacatgatctatcaattcacgacagccgtaaatcacaccgtttccgtcgtttcctgtcactgtagtcatgtttccacgggtagaaatggtaaatccctcctttttcagtccggctgtatcagcagcctgttccagacggatgcagacctcatctttatctataccggcagtatccgacaacataacagacgaataccccgcatcttccagcgcttttttcaaatgttctccagcaaacagcacccggttcgacgcttcctgcggcatcacaatattcacattgggtttctcgcacccccataacacgcacatacatgcgacaagtgttcctagcctgatatttttcattcttttcatataaattatttacagttagacgaaaaaaacaacaagacgtactcacaagacctccgccaatcgtcaaaaagcgaggaaaaagcacaagctatcacaaaaagaaataaaacgatgaacaaataaactcatccggacttttaaaattaactcagagaatgcgcatttaaactgagaaatatacagtatctaaattttaaaaatgaaagaacaatgaaagaaaaatctaacctgaccctatttatggaacaacttatccggtcgctaaaagaagaagagcgtttcagtaccgcccacatctaccaaagcacattgaacgccttcatgctcttctgcaagaccgacaccatccggttcaaccagatggaacgttcatacctgaaacaatttgagaaccacctgcgtaacaagggatgcacctggaacactgtttccacttatatgcgtaccttgcgaagcatctacaacaaagccgtggacgatggtctgacagaagaaaagccccgtcttttccgtcacgtatatactggtgtaaaagccaataccaaacgcgccctcgatgccaaagacatgagcaaattattaagtgcctcccttccacgccccttgccgcaaagtatggaagagagccgggcatggattaccctaatgttcctgttacgcgggatgccctttgtggatctggcacacctgcgcaaaacagacctgcaagattccgttatctcctaccgccgccacaaaacaggaaccctgctcaccgtagagattcctcccgctgccatgaaccttatcaaacggtatcaaaatacagattccaactccccctacctgcttcccattctcagtggaaaccggaaaagcgaagaagaatatgcagaataccaacatgccttgcggaaactgaactatgacctgaaacaactggcggtatactgcggaatcaaactcaatgtcagttcctacaccagccgccacacttgggccactttggctaaatactgccacttttcggaacaattgatttgtgatgccctagggcactcctccacaaaggtgaccgaaacctatttgaaaagttttaaaaacgatgaattagacaaagcaaataaagtaataattaatcacattaacatttctatataatcaattttaaaacttcacattacattataaaacagtaaattacaagactgttactttagaagtaacggaacagattttggaagcaaaagtatacaaactttagatacagtgcaagatttctacacttttttttcgtttttatttcaaaaaatttttttattccgcatatagccctccctgcccatactctgatcgtcaatatgagttaagctacattcccagtcttttatcttctctaacagccactaaatctttattttactgctgttttcatgtttttttccctccctccttcccttccgttacttctaaagtaacagaaaaaaaacaaaacaaaaatattgacaatgcgacattcttacttatttataatagcaatcatgctagcagttatgactccgcgtatagcctcggctcaaagtatcgctgtaaaaagcaatgttctttatgaccttaccggcactttcaacctgggaggagaaataaggtgtgatgacacccattcattcaatctgagcgtcaactataatccctggaatctgggagaaaacaaaaaaatgaaacatattctgatccagcccgaatatcgttggtggctcaatgaaacattcataggaagttttttcggggtgcaagcccatttcgcccaatacaatttcggtggaaccactccttttacaacagtaaagaacaaccgttatcagggtaatctgataggttgcggcattacctatggacaccaatggttgctcagcacattctggagtcttgaagcaagcatatctgtcggatacgcccatctcacctatgataaatacggtcccgccaaaggagacgcacttattaagaaatcccactccaactatgtcggacctacccagctaggcatatcattcatttatttcattcaataaatataaaagcaaatataccctatcagtcatgaaactcaagacaaacatactattcagtcttttattatgcggcacctttgccactgcacaaaacctgaaacttgatatcctgcctccctccgttactctcggacaggactctgccatagtgtccatgaaaatgactctcaatgttccccagatggacaccaaaagccatatccgtctcacccctgtcctcacagacggaacccacactgcagaattacctcaaattctgctcaacggagaacgtgcacatcggctataccgccgcaccctggcgctcaacaaacgaagaggcaaagcgaatgtaactcccgtatttaccgctatccccttgacagacagcgatcagactatccactaccgtgcttccctcccggcagccgactgggtacagttcgccacattgaacctcaagaaagaagtcatcaacggcaacggagagaaagtacaaagtgaaaatatccccattccggacaaagcaacccatatagcaaaagtaacagataatttcgttccccaacaggacaggaaccgggaagctcctatggcagcagcctcaccctctgcccccgttgttccggaacaccgtcctgtttcccctgccccgtctgcaccatctgccaaaccatatttcaaaggaagctatgtatctcccgaaagcgacgcaaccgatgaacgcaaccagaaagagctgaacttcagtctggacgaagcgcgtgtcatagccgaaatcaatccgcagatgctttcgttacgcgagctttacaccgtagccatcagctacaagaacattccggaacagttctacaaaatcatagatattagtgtcaagatatatccggcaagccccgttgccaacctcaacgccgctgctgccgccatcgaacggggcaacacacaggcagccggccgctatctgcaaatggcttcccatgaaacgcttgcctacaagaactgccgtggcgcctacgaactgttgtgcaacaacacctacgaaggcatccgcctgctgaaagcagccaaagccgaaggctcggaagaagccacctataacctgaaaatattctttgaatccaatcaaaccaatatacaataaaatatgaaaacccggtatatcctttcttgtcttctgctcggcggcgccctttccgtttccgcacagaaaatggctgtcaaaagcaacctgctttccgccgccaacggtgcgctgaatgccggtgtggaatatgccttcggctccaaatccacattcgatttgtccggcagcatacgtccgtggaaacgctcggaaggatatgtcaacaaatattggctcatacaacctgaataccgctactggacttgccagaaattcaacggcagtttttggggagcctatctcaacggagcgcagttcaacgtaggagggaaaaagatgcctttcgggctcttcccctggctgaaagagcaccgatatgcaggctggctggccggtggaggcataagttatggataccacatcatgctcaaccgccactggaatatagaagtttccgtcggtgtagggtatgaatatatcgattataagaaatataaatgccctgacgtgtgtgccgaattactggaaaaaggccattatcactatttcggcccctccaaagcatccctgagtatagtttacatatttaactaaagagccatgaaatatttattctattttatatcatttatttttcctacgctttgctcatcagcgcagccggcagaacgggacagttcgatttacatcgcctcctcccagctctaccggatgggagaaagtctggtagtgtccatgcaagtagacattaccagacagattccctctaacgaatcagtcatactggttccccagctcagcgacagcctggacaacttcatccagcttcccgccatctatgtgaacggtcgtaaacaacatattttcttccaacgtgaaaccggccggcaggaaaaagactatgaagagttacgccgccgtaatgaccggaaacaaagcgtacactacttacgcagcatccccttcactcactggatgaaacatgcctccttgcatctcatcgaaaaagaatgcggatgcggagtcccccgccatacagactccacctatctgacccgcctgaatatgcttcccgatatccatccgcacgtagcgtttatcactccgcagatggaagaaaggaaattgcgtgaagaaagcggacgtgcctatctggacttcccgctcaacgaaacaattatctatcccgaatacagaaacaatccggccgaactggcaaagataaaacgcagtatcgacttgataaaaaacgataccaatgtagtcatttcacatattgacattcatggatacgcctctcccgaaggtccctactcaaacaacgagcgtctggcacgggaacggacccagaccctgaaagactatgtatgcagccaatattctttcaatgatacattgtttaccacccattacacccccgaagactgggacggatttatcaagttgctgaccgataccgttatttcccatcgcgaggaactgttacatattgcggagagcaaaaacagccccgatgagaaagaacggaaaatacggaaacgttatcccgaagagttccgtttcatcctgcaacactggttcccgggtctccgtcattcagactacaccatccactatgtggtacgtccgtttacggtagagcaggccaagcaggttttcgaaagcaaccccaagaatctgagtattgaagagatgttccgcatagcccagacctaccctgccggcagtccggaatacaataagattttcatgacggccgttctgcttaatccggaacatcccgttgccaatctcaatgcagcttgcatcctgctctcacagggagatacaaaaggcgcctcactctatttggacaaagccggtgagactcccgaaaagacccttttgcaaggtatcatgcaaatgctgaatgggaattataccgaagcagaaaacctgctgcgtaaagcgaaagaagcaggactgccccaagcagatgaaaacctgaagatattacatgagatttactaatcacatttttttactaaaacatttttacattatgaacaaaaaattattattatccttcgctcttgcagctgcaatggcaggatgtattaatgatgcagatgtcccctcaggaaatggagacaatccgatttccggagccaaaggaggcaacatggagatttcatttgtagtccctaactcttctaacggcagccgtgccgcttccgccgaagactctggagtctatgaagacggtactgccgaagaatacaaagtgagcaatgtgaaactctatctgtttgattcttccagcaagaatttggttactaccctcgacgtagatcaaaatgaattgggtatctccagcaaagagaacaaccaagaaggacaaaccatcatctattcttgcaacaaggaaatcatattggaaccgggcaactatgacatccttgccgtagcgaacggtacacaaaaccttgacatcgaaaaagaaataggccaggaatcaacattattgggacagattgacgccaccacttatggaaacggtatgataaccagcgtacccggaaagggattcatcatgtccaaccgtggctcggccaatctgaacattgccgtagaatctcccgaaaagagcgacaccagagcacacgtcagaatcaatttggaacgtgccgttgccaaactgatggttagaaatgacagcaaggaaatctacacgttgaagaatcctaagggagtgacttacgccacagtccggctgaacaactacaaattcatcaatctggcaaacaagttctacactttccgtcatgtcgctacactggatgccgcatctgaaactccttccgctccgtcatcttacagcgtggaagcaggaaatttcggtaacatagccgacaacaacggttatcttatcgatccctatttcttcgacaagaccgtagcaggagctactaccagtttcacaggcggttcattctacactaaccacctgtcaaaacaaacagacagcaattggtccggtctggccgatgcaggaaagtacgtttccatgtattgtcttgaaaactgtatgttccgtccggcacagaacacggtgtacaccaccggcatcatgctgaaaggtacattcactccggaagcctcacagaccatcggcactgacggccagccggtagaagacccgctcgtattcaagacactgtattatttcaactataaattctacaccacgctggcggctgtgggtgaacatggtgatgccaatattgatggtttgacagaagcatccagcgatgcagacctggcagccaagcagattacccgtttcaccaagaatgaaggtaatttctccaccttctacaactattggatcaaacatcttgataacggcgatcctaccacaatgggcgtaatggaattcggtattgtacgtaacaatatttattctgtcaatattaccagcatcaagaacctgggtcccggcactccggataccaaacccgatccggacgaatacaaagcatacttggacgtagaattcggagtatatccgtggattgtccgtgaccaagatgccgaccttgaataaaacagtctcaaaatagaaaaacaatgagtaaaactgctactatcctcttcgccctatgtactcttttctgtagtgcatgttcctgggtagacgatgaccaatccgattgtcccacaggctgttggttaaagttatcctatacctataatatgctgaatgtagatgccgtgaccacccaggtaaaagatgtcacgctatttattctcgatcaggaaggaaactatatagaccgggaggaagtagacagtcttacattccatcaaaatgaatgtataatccaagtcccctccctgcctcagggagattacacctttctggtttgggcaggtttgtcggactcgcattatcaacatactcccacttcactgacactattacgcaatgaggcgggagaacaatccgaaaaactttcatctctattccacgggcggctggacaacgtgcatatcagcggcgaatatcaggttttggctctctctcttactaaaaacacgaatattctgagctgcatattgcaaagtcagtcggccgtcccgctggatacagatgatttccgtctggaactgactgccggcaacggatgcatggatcattggaacactccgatagactccgtttccacctgttatctcccctttatgcaagaaagcgccaatttggaagacatacaggtagtacatgccggaatgaatacattgagactgatggaaaatgacgatacccgtctacggttaatctatcaacctagtggaaaagagattttcgatattccgcttacacaatatctgctcctgtcacgtaatgtcgagacaacctatatgcctccacaagaatatcttgacaggcaagaccgctataatctgatattttttcttgactcaacaaatgatccgcagcaaccttatatatgtttacaaatgaaagtaaacggatggatgatacgtataaataatgcagaattagataaataacctttctaattcgaacatttcaacctatattcgattccgttaagaaaacaacttattttgtaaaatctataaaacggaacattatgagaaataaaaaaaaattcaacgagtttatgaacaaaacgattgatgaactgaaagacgagaaacgttatggtacggctcacatttatcaaagcaccttgaacgcattcagtgaattttgtggatgtgaggttatttactttcaccagctcaacagagccaatctgaaagaatttgaaacctacctgcgtgacaagcaactaagttggaatactgtttccacctatatgcggacattgcgtgcaacttataacaaagcagtggataaaaaaataataaccgagaattcccgtttatttcatcatgtctacaccggcgtgaaaaacgatataaaacgcgcattggaagtagaagagataaacaagttactaaacgaggttcctctaaagaaactaccggaagatttgatacgatgcagagtttgggctaatttaatgtttcaattacgcggaatgccctttgttgatctggcccatcttcacaaaagcgacttgaaaggcaacacactttcttatcgccgatataaaacaggtgggcaaatgattgttgatattccgataacagcaatgaagctgataaacaaatatcaaaataccaatcaggactctccctacctttttcccatcctcagtggaacaaaaaccggagaggatctatatacagagtatcagcaggcactacgaaccatgaattacaatttaggcagattggcgaaaaaatgcggagtggcaaccaaggtcagttcatacactacgcgccatacctgggccacccttgccaaatattgtaatttctccgaacaattaatatgtgaggcttttggacactcgtcagtgaaagttacagaaacatatttgaaaaatttcaagaatgaagaaataaagaaagctaatgatgcgataattctatacgtttcaaataatggaaaaaagagagtataaatagataaaattctaattatcaatagatttacattgtgttacttcgtaagtaacagatcttatttggagggcaaaaatagacaattaactgatagcaaacaaataaaggcacagcttttttctagattttaattaaaaaggttatataatagataaaaagtaataataa

SEQ ID NO: 14421 - DNA, 7109 bp, Unknown
  gut microbiota DNA sequence
attgacgcatccattgggcttgaaggtgatcccttctttttccaataattctttttgtttctgccagccgggaactagtcttccttggctgtttactacccgatggcaaggaagatgttgttcttctggtgcatgagataaagcttgtcctaccattcgtgaacattggggcttgcctataagctgtgctatttttccgtaagtagaaacattgccgtaggggatttcttttataatgctatatacttctttataaaattgtgctctgtccattctgtttatttatgaatgaaatgcttgatagttgttatgggatgaaaaaaaatcattcgcggaccagcatatcgcattacttctcgcattcgtttcttcatttctggtttataacaatgtatgggacagttgcggcaagtctttttttgttcaccgaatgtacaatgctctaatctgttatgtgcataatgcaataactgctgacaggttgggcaaagctctttattgccttccttgtaccgacaataaattcggatcatttgttctgcggtacgttgttctctttcaataattctcatctgtaatgaagtttttgtgtgaataaggtgcaaatataggactattttttcttatttttgtattcaattagtgtataacctttaaaacaaagaaataatggataaagttgttgttaattcgtacgaggattttgagaagctgctaggacggcagattggtatttccgactatgtggaagtgtcgcaagaccgaattaatctttttgcagatgctaccttggatcatcagtggattcatgtagatacagaacgtgctaaagtggaaagtccttatcatagcactattgtacatggttacctgactctttcgttgcttccacatatgtggaaccagattatagaagtgaataatctgaaaatgatgatcaactatggtatggacaagatgaaatttggacaggctgttctagcaggtcagagtattcgtatggtagcaagtcttcattctttacagaatctgcgtggcgtagccaaggctgaaattaaatttacaattgagataaaagaccaatcgaagaaagcacttgaaggcatcgctattttcctgtattatttcaattgattttttcaaataatgtctgaaggagagttaggtgtatttttatcgttcttggataaatgtttttacccaagaacgattgctttgttttgattttttttagacgcgtatatatccttttggagaagttaaggattaacaaaattaataatgaagcagaataggtatttaatgatcatctataaaatgaaaaacttattttaggttgtttttctctaaataataacacaaatgatcatatattttgccatcatagctcacttcggcttgatggagaatgccttcgtatgcaaaccccattttctccaaaacacgttgtgaacgtttgttttgaggataacaatttgcactgatcaaagttaatcctagtttgttgaagccatagtccaagacagcagaggcggcttcaaatatatatcctttttcccattgggcttcgtctagccaataacctatcattccggtatttgaattctctctcttagggtctggtagaattcctatagctcctatcagaagctggtcttcctttctagtgatggcccatgtgtttttttgtggtataaatattgtttgaagaattttcagagattcttccagcgtgtcatgaggcttccaaccagcattatttcctaggttgggattctggcaacagttaaaaacagcttctgtatcattctctgtaaaaggacgtaaaataagtcgctcagtttctattacatgatttctcacaggagggtattcctgcttttttttgtaaacacactctatccggtttccatctggatctagtaccacactttcaaaatagccatctcctgaaatgcgaggttcacctacgatatggtatcctttagtacgtagctgttccgttagtgataagatagcttcttggctttcaaaagaaaaagctagatgagtcaatcccaatctgttttcttctatcggaacattttgcacgtcaatcctactcatcaactctaatgtagcaccactttcaaatgaaatgaagtaagattcaaaacctttttgggaattaatgtatttttcattacttgttccgttaaagtaacgagtgtaaaattcccttaatttttccagatgaaatgtccaaatggcgatatgatgtattttcatgagtgattatttattcattatagatattttctttagttcgtttttattccaaataaatcatctttttggtcattccaccatcgatgatgatattttgtccattgatgaaatcattctcttcttgacataaaaataaacacatacgtgctatgtcttccggtttgcctactcgtcttgatggatgttgggcatgatcttctgggcgtagccgttcgtaatcattggtctgaatccatcccggcgaaatacagtttacggtgatatgaaagtcggcaagggataaagcaagtgcatgggtcagtgaatagattcctcctttggaagccgcatagctttcgcttcccggttcgctcattaaataacgggtggaacagatattgataattctgccatacgggtgattttctgcttgggatttgcgatgtaaagctaatgtgcgtgaggtgataaatacaggtcgcagattgatggacaaaattttatcaaaatcttccacgctggtttctgtgatgggagaaaattcgcttattccggcattgttgataatgatgtccatatccccccactttttaaaaagttcgtgcatacagttctcaagggattctttatctcttacatcggtatggtagaaaattgctccggtctctttggctgtctgtattcctaaatccttatttttgtcacaaaaggcgacttggtattgtgagttgcagaaagctttcacaatgtttttccctatgccatcggcacctcctgtgatgaatgcttttctaggaagtttgatcgtattgtctgtcaggtcctttggttgaagcttgacggaaatcgttttcttctttccttgtttacgttttttttcccatgcagcctttcgggcttcatattgttcgtattgtctttctatataattgtctgccataagttttgaaatatatttatcggaatgttattctattgtttaccataaaattaacagctccatatattattattccaataaattgtgctgtaaattctttgatccctattgcttctatcatcagtatcacaaaaagaagttgtatgccataggcaataccgaaagcggtacaaaagagcattatttgttgccaaagactgttttggggattgctggaaggaaaaatccaatatttgctccatataaaattatgggtttgagcgatgagatatgccataatatttgctactatatattttcctttgaatgagaagtaattcatcacaatccatatcactaacatggtaataagataatttaaggttcctattgtagcaaaacgaactaaacgtactgatgctttcatcctctttttattggtttgttttatatggtgaatttgggtgcaaaattactaaaaatatgtgattttaatgcttgtataataaaaaagaagcctacttctcttagtttctgttttaatgttgttcagtatttttttaaagaaaatttaaactggcttttttcagttttgttctgaatttgaagttcaattgtaatagaggtggacttttttagggaaagatgggaagaaatgttgaaaagcatggtggaaatccggagaaagtgttgatgcaaatatgttgattttatgataatcggacaatatataaggcacacttttatatcatgcaaaataatagcattttatagatgtaccttataaactgtccgattgtaaatattcaaaatctgtgattaatgaatttcgatgattctgttcactttggctttttcttcaggagtgcgtttaggcaaatcaatggtcagaacaccgttgctggcattggcgctgattttttccttaaccacatcttcaggaagaatcaaagcttgttcgaacttagagtaagaaaattcacgacgtaaatatcttctgttgtgatggtcgtcctcttttgtttcattctttttctccattgagatcactagttcgttgctttcgctgatgtggatattgaaatcttctttagtcatacccggagcagcaacctctactttataatctttgtcactttcaatgacattaattgcaggagcggtagcgtttgctcttgtcaaccattcattatcaaagaaatcgttgaaaatacttggtaaccaattctgattgttatactttctagtcggcatcataattataatctcctatattttaaattgttactagactgtttttgaatctttttatcttgtcgtttttggcaatacactgatgttcttgcaaagtatatgcctgatggcaaaatgtcagccggaaatgaaatgaatttaaatctgtgaagataattttaatgaatatcgagatgtgtttaaacctttgtaaaatttgtttgcagttgagaagcaaggcaaagtgataaagaaagccattttgtcagcaaatggcagctattatttatgtctgtatattatctttgcatcgttttataaagataaccattaaagaagaaaaggaaatcatgttggcatatacttatattaaacagggaaaatttgaattgatagagaaaccgaagcctgagttgagagactcgcgtgatgctattgtgcgcgtcactctcgggagtatttgtaccagtgacttacatattaaacatggtggtgtgccacgtgctgttcccggaataacagtggggcatgaaatggtgggtattgtggagcagacaggacgtgatgttaaattagtcaaaccgggcgatcgagttaccgtcaatgtggaaaccttttgtggagaatgttttttctgccggcatggatatgtgaataattgtgctgatcctaatgggggatgggccttgggatgtcggattgatggggggcagacggaatatgttcgcgtaccttatgctgatcaaggcttgaatctcattcccgattccgtgagtgatgagcaagctttgtttgtaggagatatccttgctacaggattttgggctgctcgcatttcggagattaccgaagaagacacggtgcttgtcattggtgcgggatctacgggaatctgtactttgctttgcgtgatgctgagaaagccgcagcgcattgttgtttgtgaacaatcttctgaaagaattcggtttgttagggaacattatccgcaggtagaagttgtcactccagaagaatgtaaggaatttgtattgcaaagtagtccacacggtggtgcggatgtagtttttgaagtggcaggaggggaggatacatttcgcttggcatgggaatgtgcgcgccctaatgctgtcgttattttggtggctctttatgaccgtcctcagattcttcctttgccggatatgtatggaaagaatctgatcttcaaaactggtggcgtagatggttgcgattgtgctgagatactccgcttgatagagatgggaaaaatagataccactccactaattacacatcgtttcccgctagatcagatagaaacggcttaccagatttttgagaaccgacaggatggagtgataaaagtagctgtggcaatggaggctggaatgtaaattaaaagcaatgaaatagtataatataagagtgtatgcctattattgaaatatcatcattgacacatcccggagtggatgttttctgcatgttgacggaagctcagttacgccagcgtatagaacttgggaaaggggtgtttatagccgaaagccccaatgtcattagtagggctttggatgcaggatatgaacctcttgctcttatgtgtgagcgtaagcatatctctggcagtgctgctcacattatcaagcgttgtggtgatgtgcccgtttatacgggtgatagagagttgttggctacgttgactggctatgttctgacacgtggtgtattatgtgctatgcgtcgtccggtgttgccctctatggaagagatctgccgggatacccggcggattgtagtcattgacggtgtggtagacactaccaatatcggggcgatattccgttcggcagctgctcttgggatagatgctgttttgttgacacgcaattcttgcgatccgttgaatcgccgtgcggtaagggtgtctatgggttcggtgttcttggttccatggacatggttggatggtacgattggcgatttgaacaagttgggtttccgtactgctgccatggcgttgactgatgattctatctctatagatcatcccatattggcggctgaacctcggttggctattgtgatgggaacagagggggaggggctttcttacaaaacaatcgctgaagctgattatgtagtccgtatccctatggcgcatggagtggattcgctcaatgtggctactgcagctgctgtagccttttggcaacttcggattacagactcttgaaaaagatttaatgtatgattaagtttgttttttgttttattgattgaatatacaaatcagagactctgtaaacaacggaaaatccgtaagtcaggcatatctgcccgatattttagaaacaataaagtaaacaaaagttatataggatataatgggatgcctattgtgggaaatacattttgcttgcgtttccctatctataaagaaagaggcagtaaaacaccagacctacccccccccgatagatactgtataagctggtggatgaagaaagtcctgtaagtaagatttgcttttgcaatattattgtacttcgtcctcatgcgatgctttctaagggaagcgttgatgctgcacatcatgctgtacgtttattcaatacgttcccgaagcaattttacatcagttggaaaatgcatcaggctttcataacagttggcatctgtatagattgtcttaaaattctttatg

SEQ ID NO: 14422 - DNA, 30237 bp, Unknown
  gut microbiota DNA sequence
tgttctttttcatttatatcaaatacaacaaaatagcgactgtttttaagtttataatgatagcaattatattaggaagcatttcatttcaattcctagatactcgaagaattgaaaacaaaatggaatttcaaaaagaatcaaaaacgacatcacgagatgggctatggaaaaaaagaattatagaaataaatgattctcccatcctaggagtcggatttgccacatccggaacaggttataataaaaaagtaggtcgcatggaatcaggaggaggatggatttccattttatcacaaacaggaatattaggattaacgatcattttaattataacactacgaatctttaggcgtataatggttataagaagaaaaaaaatttttatattatatgcttccattctatgttttttatgcattcactctttttttgaagggtatatatatactccaggatataatttatgcttacttttttggctcttgattggctttttaacagaagcatcaaatagatattttaaaagacaatccaattaaacacattatcaattacaacctaagatatgacacttttattcttccaaaactgtatcagtcctcatcaaattccttatatccgagaatgtgcaaaaagtatgttagttaacagtatctacgttattgtaccacgaatagattataagaatcgccaaaatatgggatggaatagtaataatttattaaaaaacacaacaatccatctatatataagccctatagacaatcaaatctgcgaattgttaaaaaagatcaacacaatatgtctcttttccggtatacgtgccgataaaaatatattccattggtttaaattaagtttatcttataaagtaaaacgatacatcattacagaacctcctttcacttacaacaaaccactttggatgcactatatacgcttttatctacaggattataaattcataaaatatattgatggaatattcggatttggtcaggatgcagtaaactattataaaagtatatccaaacattggaaagtttttccttttcaatatgtcacagaaaatataattcgcacaatagcacctccaaaaggaaaaaccaaactattgtttgtaggaagtctatcaaaaagaaaaaacgtaaaaattgtaatagaagctctaaagggagtcaataatatagaatttaatattgtaggtaatggagaagaatatattcatttaaaaaaacttgcagtacgtaatcaaataacaagcaatttcataggagtaaaacctatggacgaaataccaactattatgcagcaaaatgatattcttattttaccttccttacatgacggttggggagcagtcattaatgaagccatgacattaggtttatacgtaatatctagcgaccgctgcggagcaaagacccttatctccgacaatagaagaggacttatttttaagagtaacaatatcagcgatttaaaagaaaaattacttcaatgtatatcacaaataaatattattagaaacaatacaaacaatagaataaaatgggctgaaagcattcaaggtccacaaattgcaaaatatttaattagctgtttattagaagaataagactcgggcaaacttagcagctagctagattgaataatgaacaaaatataagatacataaagaggaagaaatttaatgagttaaatgattctagaagaagatcaatgattttcgaaccaaagatcattaatgttccactaaaattcaaaatagttctatgaaataattaatagctaatttattacaaacgatatttggtgcgaacgaacttgaatttgtaccttgtggtaatcataatttaattgctatatataaagctaagtatgtctttactcaaattatagccctcttaaatagaagtataagttcaatcacattattcaaaagtatagagacgatatatattaagcattttacctgcaagaatcaacatcttgcgatgatatttgaacaactctgcaaccgctctaatttgaaaaacttgataattttagtcggagaaaatatctatgctcttgatccaactactattggtttttgtcttactgttttctaatggacgaggttcaggaagaagaaagatggcattaaagtacacactctctatgatatcgaaacgcagattccaatttatacacattactaccgcacctgttcataacaataaagtgatgaagaaaatcctttatgaacaaggttcttactacatttttgatcgagtatacaacaatttttaaagaattccataagattactcttatagaagcattctttgctgttaacgccaagaaaaatttgcaatatcgaactgtaaaatagaaacgcaaaatgtctaaaaaagtagtgtcgaatactattgttgagtttattggatattatttactaaaaattatccaaaacatttacatctttaaatattataataaagagcagcaacgagagtttttgcttttgacgaaactacatctaaaattttcaatgttctctttaaccttaatatcataatttatttaatttttaacttatcccatttttaatgggagattattgtgttataggattttactaaaaaaaattcctaatttatataacatttgcgtaggaggcaaataataaaaaacatgaaaatattacattatattcctagtatagaccgtacttcaggaggtgtaggcgcatatatgcaattgctcacagcagaactaggaaaacttgtagaactgcatgtggtaacacacagagaaaaaaatccattagaattagaaaattgtaaaattcattttataaaaaagaataacaatccattctcatctaaaggaaaaaagaattttagaaacctgctcaacgaaataaaaccagatgtgtttcatgtaaacagctgctggttaccaatgtctgcacgtacagcaatatgggccaaaaaagctggttaccatgtagtatatacaccacacggcatgcttgaaccatggattatgaaacgccattattggacaaagaaacttcctgcattattgttatttcagaaacgaggaatacaaatagcaaatgtcatacatgctacagcggaaagtgagaaaaaaaacctaatgcaattaggatggaacagcaatataaaagtaattcccaattgtgtagaagtgagcaaaattatgatgaaagaatcctggacaaaacgtaaaaacatcctgtttctttcacgcatacacgtaaaaaaaggaattaactttttaatagaagctactgcgaatttaaaaaaagaattgcaaggatatacaatcaatattgcaggggaaggtgaagaaagttacatcaacgaattaaaacaattagcctccaaattaggtgtttcagatctaattcattttataggtggtgtatacggtgataagaaatgggaactatttaaaaaagcagacttatttatattacctacacatagtgaaaactttggaattgttgtagctgaagcattggcctgcggtacccctgttataacaacacaaggtactccatggcaaaaattggagagttatcattgcggatggtggactgaaataggaacagaagctaccactaaagctttaaaagaatttctacaatgcacagaaatacaactggagcagatggggaaaaatgggaaaaaattgatagaacaacactattcgtccccaaagatagcccaagacatggtagaattatacaaaaaagtttgtctataaacataggctcaacagagctgtatcacaatatttaaccatacaaaaccaagcgcataatgaaaaagaaaacggtaggaattattaccattctgaaagttaataattatggagcggaattacaatcatacgccacccaacgtataatgaatttaatgggatatgatgcagagataatagattatctatactaccgtaattccggtcatatcaaagaaaaatgttcaatgccgttttatccgtatcctgtgaaaaatcgcataaaagaatttgggttatatgtaattgataaaatagagaaaatatttgaatctgattcaatcaaacacagaaaaatgaggtttgaagaattccataagcatttcaaccgtttctctaccaaacaatatcgaaagtattcggaattatttaataatcctccaatatatgatgcctattgcgtaggtagtgatcaagtttggaatcccagatgttatactaatctaaacccttattttttgaaattcgttccaaatataagtatcaaattcagttatgcaagtagttttggagtaaaagatattccagactcagctcggaaacaatatatagaatgtttacagaatctgtcgtatataggtgtaagagaggaaactggtgtagaccttgttcaaaaacttactggaagaaaagcgacatggtgtttggaccctactttgttgcttgacagagaagaatggagcaaggttgaaactttggtggatggtataccacaacgatatgttttggtttacgagttacattcaacagacaagattatggaaacagctctattcctagcagaagaactgagatgcaaaatagtaagaatatgcaaaaacacgtcctcgacaaaaaaaaggcctaatgtgataaacatagttgaggcaggaccatcagagtttatatatcttttcaatcatgcaacagctattgttaccaattctttccatggcacagctttcagcatcaatttccgaaaagatttctattgtgtacttactagaaaattgttaaataataaccgtcaattagatttactaaatttgtgcaaattaacaaacagaattatatatgatgatgagccattgccccaatggagcacaatagactatactatcgcatcaaaggctatagaagattttaaaattaaatcaacaaattatatacaggaggctataaatggacaaacaaaataaaaagattccacagctatgtggaaaagatttgtgcacggcgtgtcatgcgtgttacaatatatgttctaaaaaagccattatcatggtggaagaccaatatggagaattacatcctcagattgatgataatctttgtgtgaaatgtggaatgtgtgaaaaagtctgtccagaacttaaacaaaacaatttacatcgaaatggagaacctaaaatatatgcttgttggctgaaaaattccgaacatcgtaaagagagtacttcaggaggtgctgcatttgccatatcatctgccgtcattcggcaaagaggtcatgtatggggtgcagcatacggaaaagatatgtatctaacttacatagaagctaatactctagaagagttgaaagctattcagaaatctaaatacacacaatgccatgtagaagaagctttcaaaactattaaaaatgaattggatagtggagatttggttctgttcacaggaacaggttgtcacgtaaaaggattacgttcttttttaagaaaagattatcccaatttaatgacagctgatttggtatgccatggtgtacctggacaaggtgtctttcgaaaatacaaagaacatttggaagcaaaattcaatgatgaaatgttgacatatattccacgtccaaaacgtaatgttgatggtcaggaaggccaatactattctttagcctattttaaaaacaaaggaaatattaaaatggaaaaaaataacaattcttattttataggttttcagcataacttgtttttacgaagtgcttgtcatcattgtcagtcaaacggtaaagaacgatattctgattttactttagctgatttttggggattgggcaaaattgctcctttcattcatccatataaagaacgtacattaggcgtatccatgcttgctctaaattcatcgaaagcacttgctttttttgaagaatttaaaaaagatttaaattatgaactgcgctcttacaaagaggcctccatatcaaatactcagtattataaatcggcaataccctctccatatcgtgatgaatttcgtaatgattttttcaatcattcatgggaggaactagcatcaaaatatatgaaattctcgatgaaagaatacattttgtacataattaaaaaattcacccctcctatttgttattatatgttaaacaactggcgaaatggataaaataaaaatatggaaaagtatcaaaagtatattgacaactatagttgttctaataaattaagaagactgtgctggaatattttctgtgccctactttatcatcctttcggtcttcctttgttcaacacatggagaatttttgtactcaaaatttggggagctaaaataggaaaaggaagtaaagtatatgcttcttcaaaaatatgggctccttggaatttagaaataggccaaagaagttgcattggaccaaatacaatcatttataacccaggaaaagttattttaaaaaataaagttgccatatcacaatacgcttatttatgtacagctactcatgactatacttctccattgcacactttatattggcaagatatcattattgatgattatgcttggattgcagccaaagcctttattggtcccggagttcatataggggaaagggctatcatcggagcttgctccgtacaaaccaaagacgcagagccatggggagtttatgcaggaaatccggctaaatatataaaaaaaagaattttgaaaaatgaataattccatagctgccatcatcctcacatacaacgaagagaaacatatatcccgttgtatcaactcgcttaaaaatatctgtgaggaaatattcgtcatcgattctttcagcaaggaccgaactgtagaaattgcgaaagaagcaggagcgcaagtttaccaaaatccttggaaaaactatgcgacacagttcaactgggggctgaagaattgtcccattacaacagaatggatatggcgcattgacgctgacgagtttttggagggtaacttgggacctgccatgaaaaaagcattggcagaatgtaacaatgaggtaaatggagtatacgtccgcaagcgtatagattttatgggcaagcctctgttacacgggggatggtatccttcttaccacctgaaagtatggcgaagaggacatggggagtgtgagaaccgatggatggatgaacatatccgcatcttcagtggaacaacaatcacagtggaagaggggaatcaagtggacgccaatttgaatgacctgacctggtggacagaaaagcacaatggatatgctacacgggaaatggcggatatgctgatgatggaatacggactggacgacagaggcaaagaagtacaggccaagttttggggtacagaggaacagcgtaaacgatggctgaaagtgaaatatataaaagcaccgctattcttacggccatttatcaatttcaatatacgctacattctgaaagggggatttctggatggaaaagagggctttatatggcactttttacaaggtttctggtatcgtttcctggtagatgccaaaatttatgaaataaaaaaacgctttggatggaatgacaagagaatcaaggcattcataaaagaaacgtatttagataaataaccacttacattataaaagcatcaacactatgaaagtttcaattatcacctcctgctacaatcgggaagccactattcgtggagcaatagaaagtgtactggaacaggattatccctacatagaatacatagtggtagacggagcatcgaaagataactcgctggctgtcatcaatgaatataaaaacgggatagatacaattatttccgaaccggataaaggtatgtatgaagcgattaacaaaggaatacgtgcagcaacaggagatattatcggtctgattcactccgacgatttcctgttttcatctcacaccatctccgacatagtgaaaacattcgaggaacaagatgcggatatgatatacggcaacggagtctttgtagattatgacgacaccaatcagatgatacgaaactggataagcggacggtacagtaaagagaatgtaaaaaacggatggctcccactccaccccactgtctatataaagaaggagtgcatggataaatggggactttacgacgaaagttataagatagccgccgactcggatttgctggtgcgctatctgtatgaagccaacctgaaagtatattacctgaacaaatacatcgtgaaaatgagaatgggggggctttctactgatgcaggaaaaagcaaactgaaatgggcggaggacttgagaatgtataaaagtcacggaataaaacccatctcggcgctgaaaggcaaaattctttcaaagattccacagttcattgaagccagactgccgtggagtgaaataccggaagcagaggaagaaagcctgatacaacctgccgccgcaaataaaaaagaatgaaaatacgtttactagttctaaccttgctgattatcggagttcatcagcatatacaagcacaatatatgctgggaactaccggtatgatgaatattcctaccgccgacaggcagaagccgggaactgtgatgttgggaggaaattatctgcccaaacagatgatgcctgcacgattcgactacaacacaggaaattactttgtgagcatcagtttcttttcctttctggaacttgcctatcgggaaactttaataaaaggggactatatatcatccaagcctaaatacaatcagcaggatcgttcctactccatccggctgtgtgtgtggaaagaaggaaagtttctgccgggaatagcactgggagccaatgatccgatagcggataaaggagccaacacttttcaatcttactatggagtgataacgaaaggattccatctgggaggagagcattatctctcagcttctttgggatattatctggaaggcgggaagaacagtaataccaaatggttcggcaataaatacaaaggtgtattcggaggaataagctatatacccgctttctgcaaagagttgaagatgatggccgaatatgactcggacggggtgaatgtgggagcagctgtcaggctgtggaaacatttgtccatgcatgcttttacccacgattttacttgcgtatcgggtggtatacgctatgagtgtaccctaatacattgacgcaatgagcaaatatttaatagcaatcctcctttcggcatggagcatctccctccgggcacaagtggccgaaaaactacagcaactgggaatggagaatatacaaacggtaacggaggtgaacggcaacacaacgattgcttttgaagacaatgtatatagaggtacttaccggggaataggcaaagccatcgaagcagccatggaaggaatgtacgggggaaatctgcaaatggtggtgttggagcacagtatcccccagctatgcattacgctgagcgataaggtgataaccgaatataaagagaaacagattaccataggggaagtgtaccgacagatgggaatcagttatgataccgatgaagcgatggaggtactgaaaaagacacaccggacactcaattcatcggcagggaaagtagacattgtggtctatccggaagtaaaactggaaaactccagctttgaccgactttatacttattatgtcaacctggctccagccgtagaaatggctttatggaaaggggcggaactgacagcgcaagtggtattcccggtagcgaccaacctaaaaggacaatataagaagatacgtcccggagtgattgcactatcgcaagagttttgcttcggcaaaggatttttagggcgagtaaccgcaggaaactttaccaacaaccgcatgggggcacaagcggagatgaaataccgcacagcgaatggcagactggaactgggagctatggcaggagctaccgtgcaatctgtgctgaccgacgacgaaggatggtatatcagccggaaactgcggatgaatgccgcactgaaagcatctgtgtatgaacctcgcttcaatttgcaatttgatttgcaagctgcacgttatctatatggggattatggagtaagaggcgactgcacccgccatttcggagaatatgccatcggcgtgtatggaatgtataccgatggggaaataaacggaggattccattttgccatccctctgcccggcaagaagtggaaccgtaaccggggggtgcgtgtcaggcaagcggattattttgccatggaatacagtatggaatcctggggcagatatgcggatgaaaaaatgggggaaacttatcgcacccgacctgatgagaaccggagtaaccggtttttccaaccggaatatatacgctatttcctgataaaggaagcaaataaatagattactaatttttaaaaacgaagaaaaatgagaacaagcaagttttttaaaacaggtttgctgctgtttgtagcaagtttggggttaataagctgcggggatgacgacaaagaaccggaaattgtagttgaccctgtaagcgaaaatgtggaatattacattgaaggtaaagtagtagcggataatgccgcactggacggaatcagcgtaacagcgggagaagctaccgcaaccacagacgaaaacggtcaatattcactgacggtaaaagataagaaaacttatacggtgagctttgccaaggagggatatagaactgtttctgacgcatcagtagaaatagctaacaacgctaccaacagaagtctagtaacactgaacgtgactatgagcaaggaaggcgtggctgtagctgttgatcctgaaagtgataaagtgattacagaaaaaggagaaggggaaacagaagatgcccagaccgtcttgactattcccgccggtgccgtatcaaccgctaccgatgtaactcttactccgtatctggaagctgttgcaaccgatgtgactccgggcagcaaagaagaagcgattcccatgactaatattgctatcagttccagccaggatgcagctataaatcaggatgttaccttgtctgtagccaatgctagctccagcgattattattttgacgaagtagaggtatacgaaaagactaacgcacgtgctatcggtgactggaagaaatatgccgacgccgcttttgataaagcgaccaacagctacatagctgccatcaaaaagggaagttcactgaataaggattattctatccgtgtaaagagtgaaaagaatgtcagcgaaaccaagaacgatgaaatattgaaagaagacagctacagtaacgcaggaaatatgagcgctactacttatgatattccttatactgccaaattaggatgggaaatatctgcatccggactggatgaaggcgctctttcattggtgaaagctgccatagctgcacaagaaggtggatcggaaggtgtatacaccgtaaacaagacctttacagcccacgtaagcggtgactatattctgtatttctcttgcaaagccaaatatgtagaaaaagagtacactttctctattgccggtaaaaaggttactgtaaaagttaaacattatctgggagtggaatttgtttatactaaccaaagttcaagtatgcatggtggtggctctataggctaaaacagtcttttcaattaatacaaaatatgagtaaaaaagtagcattgatttcaggtatcacaggtcaggacggttcgttcctggccgagttcctgatagaaaaaggatacgaagtacatggtatcctgagacgttcttcttcattcaacaccgcacgtatagaacatctgtatctggacgaatgggtgcgggatatgaagcagaaccgactggtgaacctgcattggggggatatgacggacagcagctcactgatacgcatcatacagtctgtacaacctgacgagatttataatctggccgcacaaagccatgtaaaagtaagcttcgatgtgcccgaatacacagcggaagcggatgcggtaggtacgctgcgtatgctggaggcggtacgtatattgggactggaaaagaaaaccaagatttatcaggcatctacttcggaacttttcggactggtacaggaagttcctcagaaagagacaactcctttctatccccgttctccatacggagtagccaagcaatatggtttctggataaccaagaattaccgcgaaagctatggcatgtttgccgtaaacggcattttgttcaatcacgaaagtgaacgccggggcgaaacttttgttacccggaaaattaccctggcggcagcacgcatcgcacaaggattccaagataaactgtacttgggaaatctgaattccctgcgcgactggggatacgccaaagactatgtggaatgtatgtggctgattctgcaacacgatacgcccgaagactttgttatcgccaccggagaatatcacactgtacgcgaatttgccacccttgctttcaaggaagtgggcatcgacttgcactgggaaggtgaaggtgtgaacgagaagggtattgacacagctacaggcaaggtgctggtagaggtggatcccaaatatttccgcccggcagaggtggaacaattactgggagatcctaccaaagccaaaacgttactgggatggaatccccgcaagacttcatttgaggaactggtgggaatcatggtgaaacacgatatgaaattcgtgaagaaactccatcttaaagcaagctgttaaatcattagttaaaatttcaatggagaaatcagccaaaatttatatagcagggcaccacggactcgtgggctccgctatttggcgtaacctgcaagaaaaaggctacaccaacctgaccggcaaaagtcacaaggaactggacttactggacggggttgccgtaaaggacttctttgaccaagaaagaccggactatgtaatccttgccgccgcccacgtgggaggtatcatggcaaacagtacatacagggcggactttatctataagaacctgcaaatacaacagaacgtgataggagaaagcttccgtcacggagtgaagaaattattgtttctgggaagtacctgcatttatcccagagacgcacaacagcctatgaaggaggatgctctcctcacctccccgctggaatatacgaatgagccatacgccatcgccaaaatagcgggtctgaaaatgtgcgagagtttcaacttgcaatatggtactaactatatcgctgttatgcctacgaatctgtacggtcccaatgataatttcaatctggaacgcagccatgtgctgcctgccatgatccggaaaatacatcttgccaaatgcttgaacgaagataactgggagaacatacgctatgatctggacatgcgtccggtggaaggtataaacggagagagcagaacagaggagatactggctatcctgaaaagctacggtatcagcaaggacggggtggaactgtggggaacaggcacgccactgcgcgaattcttatggagtgaggaaatggcggatgccagtgtattcatcatggagcatgtggactttaaagatacttaccgtcccggcacaaaagagatacgcaactgccacatcaacatcggtacgggaaaagaaatctccatcgccggcctggctcatctgatagtaaaggagacgggatataaaggcaacattacattcaatccggagaaaccggacggcaccatgcgcaaactgactgatgtgaccaaattgcacgaattgggatggcatcacaaaatagacatagaggaaggggtgcacaagatgtaccaatggtatctggaatataaaaagaaataaagaacatacgcgttatggaaactcatatcgttatcatggcaggcggcataggaagccgcttctggcccatgagtacgccggaatgtcccaaacagttcattgatgtgacgggatgtggcaaaagcctgatccaactgacagtggaacgctttcaagggttgtgcattccggataatatatggatagtgacttcggaaaagtataaggagacagtaaggaaacaattgccatctgtgccgcctcatcatatactgacggagccggttgcacgtaacacggcaccctgcatcacatacgcttgctggaaaatcaaaaaacaccaccctgacgccaatattgtagtgactcctgcggatgcattggttatcaatacggatgaattccgccgggcgatagccaaggcactgctgatgacagatcaaagcaaggccattgtaaccataggtatcaaaccttgccgcccggaaacgggatacggatatatagctgcaggagaagaggtggatcaggatatacggaaagtggatgaattcaaagagaaaccggatttgaaaacggcacagcaatatgtggacgccgggaattatttctggaatgcagggatttttgtatggaatgtaaaaaccatagaagaggctatacgccgttatgcaccgggcatcgccgaggtgttcgacaggatttatccggagttctataccgaaagggaaaaagaaaccatagaagagctgttccctacttgtgaaagtatatccatagattatgccgtaatggaaaaagcggaacggatttatgtattgccggcagagttcggatggtctgatctgggcagttggggctcattacattccttgctgcccaaagataaccggaacaatgccatcgtaggcgaaaatatccgattgtatgaatgtaataactgcattgtacacacaccgcatttgaaacaagcggtgatacaaggactggacggatatatcatagccgagaaagagggaaccctgctgatatgcaaactggcagaggagcagcgtattaaagaattttcgaaagcataaggaatgattatagcagttgattttgacggcacaatagtggagcataaatatcccgaaataggcagggaactaccctttgccatagaaacgctgaaaaaactacaacaggaacgacaccgccttattctgtggagtgtacgggaaggtaaattattacaggaggccgtggatttctgccgggagcgtggattggaattttatgccgtaaacagcaattatgcggaagaaaccctggaaagtgatcattattccagaaaactgaaggcggatttgtttattgatgaccgcaatctgggaggactgcccgaatgggggatgatttacagaatgatccatgacaaatggggatacgaagatatttatcaaagttcagataataaagaagagaataaaaagcgaagcttttggaagatacttttttccaagatgtagaatccccgcttccgaatgtagtgatacagggggaagcccataagaaaactaatgttagatcagaggtaagtactgttatcagcggataacggaaacttacgaagtagtgttggtgatacccgcctgggaaggtaggtatcacctttttttgatctataccattagtatttgaatacttgttcttttccgggttctatggtcatggctttcattcctttccgggttggaatgttcagtattccctttccgccgtcagacttgatacggattactttcttatccatatagatatggatattgccgtatggagtaggtactgttccttccatccatttcaacccgcccagacaaggggtgacggagtattcttcgtaaccgggtttggtgggttttactcccagatagtatttgcccaacaaatagatggggctggctccccatgcatggcagaggctcttgccgtatggacgtccgtacatggccaaatgctgggtacctgtttcttcgggattgtatttctcccaaaaactggtagctccttctttcaacataccgccccaataggctttcatttctttcattaccgattcttgttcgcccaaggcgcacagcgcttccagttcatagaaacgcatataaggagtggtgattttcaaaatactgtcattctgcaatacggagtgtttgatggcctgctgtttatcggcattcagataattgaagaagacagagaacatattggcgtaacgggtaacggactcactctgctttccctgaatacggttgtgtaccatcgcttgtttctgctcattccagaaagcgggttccagcttggaacgtaaagcggaagccagtttctcatacttggttttgtctgccgtattgccggccagactggcacaaagcgccatggtttccaaacttttgcagaacaagacttgctcaaaggagagttcgcccttcttgtccagataaccgtctgcccagtctacgaatacccagtcaccggtcataccttccaccataccgttggcgttggtacgtcccaatacatagtccatcatgctttgcatacgcggatagagttgggttacaaagtctttgtcaccagaatacatataataatcgtaaatactgagaaaccaatagaaggtgtagtccataatggtattgctgtggctggtcacagggtcttttccacgaagcagccaaatggtacgtttcacggtttcattatcgaagaacagatagtagttcatcagataactctggatggcatcgccactccatacccaacggtcgcgcttgatgccgtcgataaagaattcacgggtagtaaggtgcatggtgtacgctcctacttcccaaatgcggttcagctcttcgtcattacatttgaatgagccccggtactcttcgggcaagtattcgtattgcatggaaacgtcctgcatcgttactcccggatcgcaagtgacatagacataacggaaagccttgctattgtctaaagtatattcatcgtatagtttccgtgtattccggatggccagatcggttatttgccccggctctgccagcaatttgtccaatgtttcgcaatattccgtatccaaggcttcttcaggactttcaccgtaatagatatggatcgttccttttccctttacatctttcagagtgatataaccaaaggtttcttttccgaagtcgtacaataccccctctttccggggagtggaggaaactgctttcatcggttttctaaccaatgaaaacttggaaggcagttgggtggctccgtcaaagttccaacaccctgcatccatataaacggtagcagaagtatcactggcttttccgctttcgtctatccattctttatcctcgtaggttactttccaagttttgtccgtatttacggtttttcctttcacataaatagtggggggagtggactgattccacactttgatgttcagactgtgttttcctgcggggagtttcaaggtggagggcataccgaattgcagtttgccatccaatttcacattgtattttccttcggcggcaatgaagatctcttcaggttccgccaggtccaatttcttgctgaattccactaccacataatggctgtctgttttccagaagggagggaaaaaagcaccgcgttccgtacggcggttgttcatctggttgcccagccatatttcataatcacccggataccagatccaggtctgggcggaggcggcagcactcaatgcaagtgctccaactaaagtggcaagtctgtttttcataatggtatcacgttttatttttccttcaaatagctatattcctttgtcagtccggcatttgccttgatactgtcgttcaccatcggaccattgttttcccatgtattacccggaccattggcgttcttcagaaacttctctccttccgtccagttgtccttgacggtgataaatgaagatccttcgtcggtgtaaagatagaaccaatgattgggatcgtgtgcataaccgggtgaaaaaatgttagaaacgcaattttccgtaatccagctatgaggttgtgaacctaatgtataaataccggctacatcatacatgtgcttggcatagtgatgaatcagattggcgtgcacgcggttattgcgcatacagtttactgtacgtgtccatccccatcccaaactgatgcccgaataggatacatcactgatttcattgtgttcgatattgatatcacttacataaccggcgcaaatgcccaaggtaccccagtcttcattggtcacatcattgatataattgttggaaatggtcagtccggtacagacctcacgacggtcggcaggatcgtatggaagatgtgtttcgtgagcggcaggactgaaactacccgccacaataccgtttccggcaatatcacggaaaagacaaccgtttatacgtcctccaccggtggcccattcataatcaatacctgtagagcccaaatgctggaaacggcacttctcgaaatcaatatcctgggcagccttgactacgactgccgatgccggacgtcccaaccaaccttgattatccagcttatgattgttcttacgaatcatagaaggacggattttatacccgtctgtcatgtacatacctgcctgaagaggaacatgaccttgcaaagagggacggatccaggtggtatattggaaagtaacattgtcaaaacgaatgtgctttaccggacggtctatagttccttccacccataccaacgtttcgatgccgggaactacggctttgcttatcttctctcctttccgaggataataatatattttacggctttcaatgtcatgataccactcgccgggttcatccagcaattccatggcattggtcagatagaaagccgagttgtgaccatccttagtcaccataggacgcggccacggatgttcaaactggatgcggctttcaggattatggaaacgcacggcggcactgtctccctgtatttcgaccgacttgatacggagatttgccacacaccacatttcatgaaggaccatttcggcatatcgggccttctgtattttctttacagcagcggcaggtacccacagtatttcgttttggggatcgttgttgatgatgcgatacatcttttcaaagtctgccacatcccttgcacgaacagccttttgtccattgatccacagttgccggaaatccagcggacgtccgttaaacatagggacatcggctacccacaactttccttgcttcttccagtttctgatttccaccccaccattcagaatggcatttccatccgaagtgatgactgtaggtgaagcttccgtcccgctgtcctcgggacgaataaagacgggttcgtacagatggtaatcacctgcctccatatgaatggtgatgccaccttttacactctcatcattaagacgacgaagttcccttgcctgacgcaatgcggctgtaagggtggccttcggagagtctttggtacccggattccggtcattacctttcggagatacgaacaaatcggctgctgatagtgtacaagctatcagcagcgcagtagtggttatgaatatttttttcatttgtaaatcattaggagtaagtggttagtgattagtccgcgccaaaggcatccataccgtcatttcagcctttccgcgatttccccatgcataataaggaatcagacggatattgaccggtttgtcggcctttcctacctcgcggtacaatgtatctttccacgatacctcatcaaccagacgggcagtaccatccaacgcgacaatcggactgccttcaatgattatttttttcggggtcaaccggatatcggcaggtatcagcacattatctatcttatgtccgccttctatatccatactttccaaacaatataccaacgggccacgttttaccactacctggttacggatttcttcggccaacggatttgcttccagcaattttacaggcatatccatcacccattccacacagtcccctttcttccagatgcggtttacctcggcgtatgtattcgctttccaagttccttgcaccggttcaccatttaccttcaaagttgctttctcgcaccagtccggaacacggaggaacaaagagaatgttttcttttttgatggtttcggagcttcggtaacagtcagcttcacagcaccttcccacggatactccgtttcttgcatcagcccgatctttcccacttccttcaaagctgtcgccagtgtattcgctccatataaattgcaatataccgcattcggagtcaccgtataagcatagttctgggcttgacaaacggtgcgcagcgtattaggcggacaacagaagcaactgatatactcggtacgttctttaggccagcgaagtgtgtatggcaaatccgcactgatgcgcaacgggttggtatagaaatatttctttccatccagactgacaccactcaacacactgttatagagggcagtttccacaatatccgcatatttggcatcgcccgtcacttccagcatacgccagttgaaaagcatattgccgatattggcgcaggtctcgttatgcgccgtactattaggcaactgataaggacggccatagctttggtgtactttctgaatactgtccggctcatagcaggtaccatccggcgaagtaccgtcatacagcgcaccgcacgctcctgtaacatacatcttgcgggtcacaatgtctttccagatgctggtcaggtttttcatcagttggtcttctcctgtttcggcatacacatcggtcacaccggcatacaggtaattggaacgcacggcatgtcccatcgcattgtattgctgacggaacggaatacggtcctgattatcatcggtgccattttccaccattccacggatatcaatcagattcttggaaagttccagataacggggattccctgtagcacggtacatttccaccacgcccatataatgggagggacaaatagcatttcttgccagttccgcagaagcggtttcataaaaatgacagaggaagtccgtcgcttttacggcagcatcgaataaagtagtctttccggtggcacggcgatgaataatacctgccatcatcagatgtcccaaattgtaggtttcaaaattcagacgattggcaaatgcacctttctcgtcctcaccgcctactttggtaccaattaccgtctgttgctgtttttccgaatgagtgtcaatccccttattcttttcctcaatgatgacaggggtatgaatgtaaccgtccgcacgctgggctttcaccacatgttcaatgaagtggtccatcagtttatccaattcgggatctttcgtgacggcatacacggaagccactccctccatccatttatacatatcaccatcatgaaagggaggtccccaatgttcgccttcgcaaacaccggcagctatttcaaagttacggaaaccatgcgaaacatcgggattgttccatgtatcccacatactttgcaaggaggtatggctatatacattgaaacggtcgccccaaaagccatctgtccaatgcacagcacctaattccgtattggccatcttggcaaaacgactttggctcatatccgtcagcccgcccgattgggcaaatgctcccgtagttactccggaagccagtaaaagtagtagtctaatgctcttcataataatctgtcacttattcttttctttataaagagaggacgataataagaaacgtttgtactctatttataattatttcatattctgtatctttagaaagagctttcattggcagataatgaaagtctgttttcaaaaaacgggtttctgatttttatttcagacacccgtttttttcaagttctccaatactttctatcaaagaactcctttatccacaatcgtattatttcagtttgctcaaatccaactctttataagccacacgctgacggcgccaggtatatacggcatggagtttgccatccttgccctgaatgatggacggataagaatattggctgatagggctgtcttccaatgtcattacattcttccagtgaataccatcatccgaaaccgccacacacaacggtgtacgcggccctttcggagtgcccggcaatgtactgaaatcattataaatcaatacgtgacgaccatctttcattgttacggcatccgtacccgaattattattgggaacatcaagcaaggtaactttactccatgtttcaccgttgtcactgctccatgaagtagcaatctgtgcgttacgtgtacggcaaagcacctgcaaacgcccatccttatgacgcaaaatgctgggctggatagcataaataggcttctcgccttctccttttatggcttcaccgccttcctgatcgtctacattggctgcatttgccttacgcaaagcagtaggcacactcatttccgcctctacaggacctaccatcttccaagtctttcctttatcatccgaaatttcaaaatggatacgccatcctccatcaccttctgtactggaaggacaaataatacggccatccacatactccggcttatttttaataggacctaagaaaccttttggcaacggttcacgttggctccaagtttttccaccatctttagaacgtaccagccaaccactccaatcggctactttcaatcctattttatagaacaggattaaatctccgccgggtatttggaaaagcacaggattccaacaagccttgcggcgtgcccgggacttatcccctttaaacgtagaagccacggggccggcatccgccggagtggattctgctgtaatgcccgccaaaacagcttgcggatcatccagactaaacaccccgtcggcagccagataaggtgcgctccattccgtcgcacccttcggcttgcgacatacccagatacaacaatccggattacgctctttagtacctccaaagaaagaagctaccaggtctccgttcttcaattccacaatagtagcgccatgacattcgggaaaagaagcttgctcgtataaaaactgatcttccacgatacctgcacggtttttacctaaagatggatccatactaaccgaaaaatgatagtttcccgaaggaacactccatacggtagagttgccttcccgacgtacaaaggtaacgtccttatcctttaccgccttctcgtccaaggtaggaagataaaccaatgcagtagtattacaaggaatcgtgatatcccattccagatgcgtaagagttttcttccaattactaatcatcttaccatataaagtgttatgcgaagctttgacataactcaactcttggatggaaaaatccggtttaaagatgatttgtttgtaagcgggctgtgccggattaaatccggctaaatcacggaaataccaagtcaatagatcacccaatatcatcacatggttacaactgttcatccaacgattggcggtatcaccgttccacaattcccaaatggcagtagctcccttttctatcatatagccataactgggataagttttgttgcttgccaacaagaaagcaacatcgccacgccccatacgggtaagctcacgcatcatccagttcatacctatcaccccactgctgatgtgacctttattccgggtaataatgcctgttattacatttttttccacttcttccctataggcttcaggcaccatatcgaaagccagtggcaggatattagccgtcactgtattgttaccatagaatatgctgtcgggataaagaacatggggcatttgtaccggagaagttcccttcttaactgtaaggaaacgggcgttgaagcagtctttaatttttgctgcatccttctcgaattccttcgcctcatcttccagaccttgcaaacgggcgaacttggccagcatttgcgataccttataatagtaggctgtagcaatcagcgctccatccgtcttgcgggcagggtcctgactgtgaatcaattccggtgattcgggaggcatacaccagtcaccgtatttatcggcgttaatcactccatcctctgtagtgaactcactgcgtatatggtgcatccatttcttgatagcggcataatttttacgaataggttcgatattgccgaactgttcataaaccatatcacagattaccggaaatgtggatgaccacgtcatttccgatgtataataattgtaataagccggacaaatatcaggaatacaaccgtcttcacgctgcgcttcacggatgtcatccgcccatttggcataggtgtttccattattgaacatgaaactttccccccacgttcccatagcatggtcgccaagccagggctggcgctcgtcacgctggggacaatccaaaggcactcctttataattactggaaatcccccaccaggcattccgataaacccgattcatgatatcattggaacattcgaaagtaccgttatcttccaagtcatcatatactacttcagcaaccaaatcttccgctttcagatttttataacctgtcacttctacatattggaatccatgataagaaaaacgagaactccaggaagtgttgttttctttaccgttgcagatataataatccgtactctggctatggcggagattttccacatccagttccgtaccgtcattctttacccgttcggcataacgtatgcaaatcgtatctcccgcagcggctttcgctatgttaatacgcacccatcctgccatattctgaccgaaatcaatcatataacggttaccatattgcttgaagacagccggcttcagcgttttcatcactttcatgttgggagcggtattgccacgaagtgtaccgtacggcaatgaaacacgttgcgctttcagccatttggaatcatcataaccgggctgtgtccagtttcccaattccatacgggcatcgtaaatttcaccatcgtattcattattgctacgtataggcccttgagccgtcaaacgccatttctcatcactgttgatgcgctgtatactgccgtcggtatattctataatcagattcaaacgtaacttggggtaaccaaaagtaggaatcttataaggtttgtaattttgacgcatagtgtagaaacgtccgttgcccagggtcactccgatggcattgtcggcatttcctccggcaacctgtttggtgacatcaaaagaattgtaaagcacagtacgacgataatcacttggagccggcgccaatacctgatcacctatccgctggccgttaatgaacagttcgtacatacccaaaccgcacaaatgaagggtagcatactttatctccttggcttgcgttttaaattccgtgcgtaaataacgagagctcaaacggctgtgtgaatcttcccggtcccatgcaaacgcagcgtcccaacctatccatcgtcctttccaatgaatctcacctaaaggtcccatcccccatcgggcaggctcgctccattctgtttcaccgcgattggtatagcttctcactttccagtaaacacgctgattgcttttcaaacgcttcccttgatagggaatccatacggacgcatcggattccacttttccggaatcccacaaatctcctttatcctgtgctaaaagttcaggagaagacgcaaccaagatccggtaggcggtctgcatcacatttctttgagaagattccaaccgccagctcatacggggagcagcagtatccaaccccatgggatctaccatctgctcggtacgcaggccggtaaccgaaacatccgctgctttcaaccacaacggaagtgccaaaagaatgattaataatacttgttttttcatgatatgcatatttcttacttattccatttctgtatggcatccggcaaggctgtccaagctttctgcacataatcctttgcagaatccacaacaatcagaacctgatcattaccgctcagataaccgctatcatgctggaaagaagtgactttactgtcaaactcaccgatatattccaacttaccgtcctttgcgctataccaccatgcattctttttcgcaccgctgattttgctcaaatcgatctgcataggacgtcctgagtaattgtaaaccaacaaatagtcatttccacgggtagcgatggcacggtcatagcgttcgccgttagttcccgcaataacactctgatcgggcacacgttcaaagaaaggaaaagtcaacatcaagttcttcagatatttcatctgattgaagccgggatcttccaaagcatcccaccatgctttcttgcgtccgtcggcaccaaaagaggctccatatcccggacggataaattgcatgatatcattatgaccgtatgagtgcccgaatgatccggcgaataccgaccaataggcataacgacgcacatcgtgctgattccaacgggtttcattgggatcatgcagtccctgtggaatgtcttcataaataggttcatcatcaattaccggtttcaacggagtctttgcctgactggcttccacaaaacgccagttatcttcttccgtattctcttcgataggatagtcaccatcaccattacgctgcccgtaacgacggtgtccgctttggaacatattgaaatccagccattcgcggtcattaaaccaagtagccgacgtggtacgtccacgcggatggaaagtcatcagatgacctttgtctatgctacggatactgtttgccaacgcatcccatacctccgtcttattatcaccacggatatcccctcctatcatccaaataatattcggctcatccttgtaacgttccgcaagaaatttaccgtatgccacggcttctttttcattcatcaacccttgttccacgggagttccccaaatacataccatccctatatagatgccccgtgaagcagcacttttaataatatagtccatgtggtcccaatatccataaatccctttgcggttgatatccttgaaattaaaaccgtctatcatggaatactgaccgtaaatattcatggaaggcacaccgttcaatacctgcacctgcaccatgttatatccggcatccttgcacttattcagatagtaagaaacctcgtcacgattcaagcgttgcggcatcagccatccagtttcacccaaccagaagaaaggtactccattttcatgcttcaggtagcgtccctcctcggacaccaccagtttgccattcttccagggaatatacgttttcgctttctgcgccggcaaggaagtagagtaacatagcaataaagccaataaggaaagtaatgcgtgtctgttcatcattgtattttcaaattcgtttattaattaacaatctctaaacaagagcttttatcaaaacaacaaggtgttaaaaaaaggtccttatgttttttaaaaaaggcggttatcttttttaaaaagctcttgatcttatgagaaaagatgaagacttttttgacaaatgtcctcatctttctcagattattcctactacttcattttctcatattcaatagccgccaaaataaaggaacctactgacttcggatcattctctattaccggctcacctatataataagcaaaacttccatcccggtttcctttaccgcctaatccggcaacagcacaacagttggtaatagtgtacgaaccatcaggttcttctttaatgaattgtttgatcaggccattaaaaccacgttctgcagccatcttatattccgaagaaatatatcctttattcactgctttacacaagaaatacacaaaaagcgatgaagcagaagattccaaatagtttcctttacggttattttggtcagtcacctgccaccatacccctgtttcaggatcttgatattttacaataccttcggccaacatatttatgatcgtcattatactgtcacgtccttcgaactgcgccggcatataatccaatacatccaccacggcagcggcataccagcctatactgcggctccagaaattgggtgagcatccggtttccttatttgcccaattttgtgtcttgctctcatcccaaccatgataaaacaaaccggttttaggatcatacgttttacgggcaatcagctttatttgattcacaatatcggcattgaccgtagtatccttgaatacgttaccatattgagccaaataaggagaagccatgaatataccatccagccacatttgatgcggatatatcagtttgtgccagaagccaccttcactggtacggggctgttcggtcagttgtttacgaagagtatccatcgccaccttataacgcccgtctcccgtcttttcataaaaatcgaataaaatctttccggcattgatattatcaatattaaaagaaagatatttcatggtctttatcttaccgtcagtgtctatcagactgtctgcatatatttttgcataattataataggctgtgtcaccggtgtgtttccattcctccaacatggatttcaccaccagtccgtgcgtatagccccaacgaggctttttcgctttttctatcatccaaggctcagggaaacgttgcatttccgactgagccatacgttcgctccatttgatttcttcggtctgtttaggagtggcagtacatgcacacattccacctaccagcaacaatgagcaaataatgtttaatcctgttcttttcatatttcttctttttactatttttcatccttacaatcagtgcaagaatcatcacttacctaagaatatatattcttcacctgctttggtttccagatcataaagataagtttttttcaactcaactttattcaatttcgcttctttatttataatcggttgcaagatttcgggtatggcatacaatttattcggattctccccttttgccgttctcagccctttgcctgccagcggatttaaagaacgcaaacgacagttccccccattacgggatttcaccaccaaccggctcactttaccattcttccaactcaaatccaattcaaaacctccacgagctataatcccgttcacgcttccttctttccattgcgccggcaatgcgggaagtaaataaataaaaccatcgtggctctgcatcagcatttctacgatacccgctgtacaaccaaaattaccgtcaatctgaaaaggtggatgggcgtcaaacaaattaggataagttcctccttttttcttctcgttacgtacgagagtcaactgatcggttatcagtttataagcatgatcaccatccaacagacgagcccacaaacataccttccatcccatactccatccggtagacggatcgccacgatggatcagcgaagtacgtgccgcatcaaacaattcgggagtacggtaaggagaaatctgattactggggaacaaaccataaaggtgtgacacatgacggtgtacatcctgcggattgtcccaatctgtcatccattcctgcaattgcccccaacgtcctatctgcatgggtgccatttcctttaaacgctgttccaaatgggtggcaaattcagcatccgtacccaataatcgggcggtagtgattatctgattccataaatcgaatatcagttggttatccaaagtacacccggcagccgtagtcgcttttccattactgcccgcatgagtattctccggagaattgctcgggcataccaccaaccaattatgtaacggttccttcaccattatttcatcaaaaaacttaccggcttctttcatgatagggtaagccgaacggagaaactccatatcgcctgtataaagataacgttcccacaaatgacggcacagccaagctccacccgtaggccataatcccgacggagccttgtctatagctccggtaacacgccatatatccgtattgtgatgcaatacccaaccatccgccccatacataatctttgctgactcacgccctgtttcactcacttcacgaatcagctgtatcaaaggctcgtgcaattcgctaagattcgtcacttcggccggccaatagttcatttcaacattgatattacaagtatatttactatcccaggaaggaaataatttatcattccaaatgccttgcaaattagcaggctgcccacccggctgtgaagaacaaatcaacagatagcggccgaaacggaaataagtagct
